United States Patent Application Publication US 2026/0285924 A1, published September 24, 2026 (application 19/490,875).

The application's sequence listing, which the Patent Office published only in electronic form, follows.

SEQUENCE LISTING (2364 sequences)

SEQ ID NO: 1 - protein, 41 aa, synthetic construct
MMTYGNLLDYLRECNRQEVNAVVLLYMATQISSAMEYLEKK

SEQ ID NO: 2 - protein, 41 aa, synthetic construct
MSSAMEYLEKKNFIHRDLAARNCLVGENHLVKVADFGLSRL

SEQ ID NO: 3 - protein, 41 aa, synthetic construct
MLEKKNFIHRDLAARNCLVGENHLVKVADFGLSRLMTGDTY

SEQ ID NO: 4 - protein, 41 aa, synthetic construct
MARNCLVGENHLVKVADFGLSRLMTGDTYTAHAGAKFPIKW

SEQ ID NO: 5 - protein, 41 aa, synthetic construct
MLILPASIEFRESSEDSFLSAIINYTNSSTVHFKLSPTYVL

SEQ ID NO: 6 - protein, 41 aa, synthetic construct
MIEFRESSEDSFLSAIINYTNSSTVHFKLSPTYVLYMACRY

SEQ ID NO: 7 - protein, 41 aa, synthetic construct
MSEDSFLSAIINYTNSSTVHFKLSPTYVLYMACRYVLSNQY

SEQ ID NO: 8 - protein, 41 aa, synthetic construct
MSAIINYTNSSTVHFKLSPTYVLYMACRYVLSNQYRPDISP

SEQ ID NO: 9 - protein, 41 aa, synthetic construct
MHQRWYEKEKARLEEERERKRREQERKLGQMRTQSLNPAPF

SEQ ID NO: 10 - protein, 41 aa, synthetic construct
MKEKARLEEERERKRREQERKLGQMRTQSLNPAPFSPLTAQ

SEQ ID NO: 11 - protein, 41 aa, synthetic construct
MKIFAVLCMRCQSILNMAMFRCKKDIAIKYSRTLNKHFESS

SEQ ID NO: 12 - protein, 41 aa, synthetic construct
MCMRCQSILNMAMFRCKKDIAIKYSRTLNKHFESSSKVAQA

SEQ ID NO: 13 - protein, 41 aa, synthetic construct
MNSMLQKPTAYVRPMDGQESMEPKLSSEHYSSQSHGNSMTE

SEQ ID NO: 14 - protein, 41 aa, synthetic construct
MPTAYVRPMDGQESMEPKLSSEHYSSQSHGNSMTELKPSSK

SEQ ID NO: 15 - protein, 41 aa, synthetic construct
MLEDENSFQAVSRLHGQLSSLRGEGRGGLALALVGTQDRIS

SEQ ID NO: 16 - protein, 41 aa, synthetic construct
MFQAVSRLHGQLSSLRGEGRGGLALALVGTQDRISASSPRV

SEQ ID NO: 17 - protein, 41 aa, synthetic construct
MVKPGAKKDTKDSRPKLPQTLSRGWGDQLIWTQTYEEALYK

SEQ ID NO: 18 - protein, 41 aa, synthetic construct
MKDTKDSRPKLPQTLSRGWGDQLIWTQTYEEALYKSKTSNK

SEQ ID NO: 19 - protein, 41 aa, synthetic construct
MTSNKPLMIIHHLDECPHSQALKKVFAENKEIQKLAEQFVL

SEQ ID NO: 20 - protein, 41 aa, synthetic construct
MMIIHHLDECPHSQALKKVFAENKEIQKLAEQFVLLNLVYE

SEQ ID NO: 21 - protein, 41 aa, synthetic construct
MFFFVKVFNTLLKDKFIPKRIIIIARYYRHSGFLEVNSASR

SEQ ID NO: 22 - protein, 41 aa, synthetic construct
MFNTLLKDKFIPKRIIIIARYYRHSGFLEVNSASRVLDAES

SEQ ID NO: 23 - protein, 41 aa, synthetic construct
MDKFIPKRIIIIARYYRHSGFLEVNSASRVLDAESDQKVNV

SEQ ID NO: 24 - protein, 41 aa, synthetic construct
MAGARGEPSGIEPSGLEEPPGPFVPEAARARMREPEAREDY

SEQ ID NO: 25 - protein, 41 aa, synthetic construct
MSGLEEPPGPFVPEAARARMREPEAREDYFGTCIKCNKGIY

SEQ ID NO: 26 - protein, 41 aa, synthetic construct
MHECYAKVFDEFKPLVEEPQNLIKQNCELFEQLGEYKFQNA

SEQ ID NO: 27 - protein, 41 aa, synthetic construct
MPLVEEPQNLIKQNCELFEQLGEYKFQNALLVRYTKKVPQV

SEQ ID NO: 28 - protein, 41 aa, synthetic construct
MPTLVEVSRNLGKVGSKCCKHPEAKRMPCAEDYLSVVLNQL

SEQ ID NO: 29 - protein, 41 aa, synthetic construct
MSRNLGKVGSKCCKHPEAKRMPCAEDYLSVVLNQLCVLHEK

SEQ ID NO: 30 - protein, 41 aa, synthetic construct
MVGSKCCKHPEAKRMPCAEDYLSVVLNQLCVLHEKTPVSDR

SEQ ID NO: 31 - protein, 41 aa, synthetic construct
MRMPCAEDYLSVVLNQLCVLHEKTPVSDRVTKCCTESLVNR

SEQ ID NO: 32 - protein, 41 aa, synthetic construct
MKVPATDTYSISGYGAAGGKGGKNTMMRSHGVSVLGIFNLE

SEQ ID NO: 33 - protein, 41 aa, synthetic construct
MYGAAGGKGGKNTMMRSHGVSVLGIFNLEKDDMLYILVGQQ

SEQ ID NO: 34 - protein, 41 aa, synthetic construct
MMMRSHGVSVLGIFNLEKDDMLYILVGQQGEDACPSTNQLI

SEQ ID NO: 35 - protein, 41 aa, synthetic construct
MDMLYILVGQQGEDACPSTNQLIQKVCIGENNVIEEEIRVN

SEQ ID NO: 36 - protein, 41 aa, synthetic construct
MTGGHSCPQAMKKWGWETRGGFGGGGGGCSSGGGGGGYIGG

SEQ ID NO: 37 - protein, 41 aa, synthetic construct
MWGWETRGGFGGGGGGCSSGGGGGGYIGGNAASNNDPEMDG

SEQ ID NO: 38 - protein, 41 aa, synthetic construct
MEEDDEDDEDSEEDSEDDEDMQDMDEMNDYNESPDDGEVNE

SEQ ID NO: 39 - protein, 41 aa, synthetic construct
MDEDSEEDSEDDEDMQDMDEMNDYNESPDDGEVNEVDMEGN

SEQ ID NO: 40 - protein, 41 aa, synthetic construct
MRYAGMALTNLTFGDVANKATLCSMKGCMRALVAQLKSESE

SEQ ID NO: 41 - protein, 41 aa, synthetic construct
MKGCMRALVAQLKSESEDLQQVIASVLRNLSWRADVNSKKT

SEQ ID NO: 42 - protein, 41 aa, synthetic construct
MLVAQLKSESEDLQQVIASVLRNLSWRADVNSKKTLREVGS

SEQ ID NO: 43 - protein, 41 aa, synthetic construct
MQQVIASVLRNLSWRADVNSKKTLREVGSVKALMECALEVK

SEQ ID NO: 44 - protein, 41 aa, synthetic construct
MQKALEAELDAQHLSETFDNIDNLSPKASHRSKQRHKQSLY

SEQ ID NO: 45 - protein, 41 aa, synthetic construct
MELDAQHLSETFDNIDNLSPKASHRSKQRHKQSLYGDYVFD

SEQ ID NO: 46 - protein, 41 aa, synthetic construct
MNIDNLSPKASHRSKQRHKQSLYGDYVFDTNRHDDNRSDNF

SEQ ID NO: 47 - protein, 41 aa, synthetic construct
MPKASHRSKQRHKQSLYGDYVFDTNRHDDNRSDNFNTGNMT

SEQ ID NO: 48 - protein, 41 aa, synthetic construct
MSSAAHTHSNTYNFTKSENSNRTCSMPYAKLEYKRSSNDSL

SEQ ID NO: 49 - protein, 41 aa, synthetic construct
MSNRTCSMPYAKLEYKRSSNDSLNSVSSSDGYGKRGQMKPS

SEQ ID NO: 50 - protein, 41 aa, synthetic construct
MEYKRSSNDSLNSVSSSDGYGKRGQMKPSIESYSEDDESKF

SEQ ID NO: 51 - protein, 41 aa, synthetic construct
MNDSLNSVSSSDGYGKRGQMKPSIESYSEDDESKFCSYGQY

SEQ ID NO: 52 - protein, 41 aa, synthetic construct
MVSSSDGYGKRGQMKPSIESYSEDDESKFCSYGQYPADLAH

SEQ ID NO: 53 - protein, 41 aa, synthetic construct
MHSANHMDDNDGELDTPINYSLKYSDEQLNSGRQSPSQNER

SEQ ID NO: 54 - protein, 41 aa, synthetic construct
MLCQEDDYEDDKPTNYSERYSEEEQHEEEERPTNYSIKYNE

SEQ ID NO: 55 - protein, 41 aa, synthetic construct
MYEDDKPTNYSERYSEEEQHEEEERPTNYSIKYNEEKRHVD

SEQ ID NO: 56 - protein, 41 aa, synthetic construct
MYSEEEQHEEEERPTNYSIKYNEEKRHVDQPIDYSLKYATD

SEQ ID NO: 57 - protein, 41 aa, synthetic construct
MLDSFESRSIASSVQSEPCSGMVSGIISPSDLPDSPGQTMP

SEQ ID NO: 58 - protein, 41 aa, synthetic construct
MRSIASSVQSEPCSGMVSGIISPSDLPDSPGQTMPPSRSKT

SEQ ID NO: 59 - protein, 41 aa, synthetic construct
MSGMVSGIISPSDLPDSPGQTMPPSRSKTPPPPPQTAQTKR

SEQ ID NO: 60 - protein, 41 aa, synthetic construct
MIISPSDLPDSPGQTMPPSRSKTPPPPPQTAQTKREVPKNK

SEQ ID NO: 61 - protein, 41 aa, synthetic construct
MLPDSPGQTMPPSRSKTPPPPPQTAQTKREVPKNKAPTAEK

SEQ ID NO: 62 - protein, 41 aa, synthetic construct
MTESEQPKESNENQEKEAEKTIDSEKDLLDDSDDDDIEILE

SEQ ID NO: 63 - protein, 41 aa, synthetic construct
MKESNENQEKEAEKTIDSEKDLLDDSDDDDIEILEECIISA

SEQ ID NO: 64 - protein, 41 aa, synthetic construct
MQEKEAEKTIDSEKDLLDDSDDDDIEILEECIISAMPTKSS

SEQ ID NO: 65 - protein, 41 aa, synthetic construct
MKTIDSEKDLLDDSDDDDIEILEECIISAMPTKSSRKAKKP

SEQ ID NO: 66 - protein, 41 aa, synthetic construct
MAKKPAQTASKLPPPVARKPSQLPVYKLLPSQNRLQPQKHV

SEQ ID NO: 67 - protein, 41 aa, synthetic construct
MPPVARKPSQLPVYKLLPSQNRLQPQKHVSFTPGDDMPRVY

SEQ ID NO: 68 - protein, 41 aa, synthetic construct
MPHHYTPIEGTPYCFSRNDSLSSLDFDDDDVDLSREKAELR

SEQ ID NO: 69 - protein, 41 aa, synthetic construct
MIEGTPYCFSRNDSLSSLDFDDDDVDLSREKAELRKAKENK

SEQ ID NO: 70 - protein, 41 aa, synthetic construct
MNLTKQTGLSKNASSIPRSESASKGLNQMNNGNGANKKVEL

SEQ ID NO: 71 - protein, 41 aa, synthetic construct
MGLSKNASSIPRSESASKGLNQMNNGNGANKKVELSRMSST

SEQ ID NO: 72 - protein, 41 aa, synthetic construct
MESASKGLNQMNNGNGANKKVELSRMSSTKSSGSESDRSER

SEQ ID NO: 73 - protein, 41 aa, synthetic construct
MGNGANKKVELSRMSSTKSSGSESDRSERPVLVRQSTFIKE

SEQ ID NO: 74 - protein, 41 aa, synthetic construct
MTALTKKYRITENDIQIALDDAKINFNEKLSQLQTYMIQFD

SEQ ID NO: 75 - protein, 41 aa, synthetic construct
MDIQIALDDAKINFNEKLSQLQTYMIQFDQYIKDSYDLHDL

SEQ ID NO: 76 - protein, 41 aa, synthetic construct
MDDAKINFNEKLSQLQTYMIQFDQYIKDSYDLHDLKIAIAN

SEQ ID NO: 77 - protein, 41 aa, synthetic construct
MHYHIRVNLVKTIHDLHLFIENIDFNKSGSSTASWIQNVDT

SEQ ID NO: 78 - protein, 41 aa, synthetic construct
MNLVKTIHDLHLFIENIDFNKSGSSTASWIQNVDTKYQIRI

SEQ ID NO: 79 - protein, 41 aa, synthetic construct
MLSNVLQQVKIKDYFEKLVGFIDDAVKKLNELSFKTFIEDV

SEQ ID NO: 80 - protein, 41 aa, synthetic construct
MQVKIKDYFEKLVGFIDDAVKKLNELSFKTFIEDVNKFLDM

SEQ ID NO: 81 - protein, 41 aa, synthetic construct
MYFEKLVGFIDDAVKKLNELSFKTFIEDVNKFLDMLIKKLK

SEQ ID NO: 82 - protein, 41 aa, synthetic construct
MFKLLKENLCLNLHKFNEFIQNELQEASQELQQIHQYIMAL

SEQ ID NO: 83 - protein, 41 aa, synthetic construct
MNLCLNLHKFNEFIQNELQEASQELQQIHQYIMALREEYFD

SEQ ID NO: 84 - protein, 41 aa, synthetic construct
MKLKKLGNLKLQEEGEASSTTSPTEETTQKLTVSHIEGYEC

SEQ ID NO: 85 - protein, 41 aa, synthetic construct
MNLKLQEEGEASSTTSPTEETTQKLTVSHIEGYECQPIFLN

SEQ ID NO: 86 - protein, 41 aa, synthetic construct
MYLYVQEKRHFGTSWVKHYCTYQRDSKQITMVPFDQKSGGK

SEQ ID NO: 87 - protein, 41 aa, synthetic construct
MSWVKHYCTYQRDSKQITMVPFDQKSGGKGGEDESVILKSC

SEQ ID NO: 88 - protein, 41 aa, synthetic construct
MSKQITMVPFDQKSGGKGGEDESVILKSCTRRKTDSIEKRF

SEQ ID NO: 89 - protein, 41 aa, synthetic construct
MRDAHTFALSKKNLQVVETSARSNVNVDLAFSTLVQLIDKS

SEQ ID NO: 90 - protein, 41 aa, synthetic construct
MALSKKNLQVVETSARSNVNVDLAFSTLVQLIDKSRGKTKI

SEQ ID NO: 91 - protein, 41 aa, synthetic construct
MPWEEARSFIMNEDFYQWLEESVYMDIYGKHQKQIIDKAKE

SEQ ID NO: 92 - protein, 41 aa, synthetic construct
MSFIMNEDFYQWLEESVYMDIYGKHQKQIIDKAKEEFQELL

SEQ ID NO: 93 - protein, 41 aa, synthetic construct
MDFYQWLEESVYMDIYGKHQKQIIDKAKEEFQELLLEYSEL

SEQ ID NO: 94 - protein, 41 aa, synthetic construct
MEESVYMDIYGKHQKQIIDKAKEEFQELLLEYSELFYELEL

SEQ ID NO: 95 - protein, 41 aa, synthetic construct
MEQKLHALKEVLKKFPKENHEVFKYVISHLNKVSHNNKVNL

SEQ ID NO: 96 - protein, 41 aa, synthetic construct
MLKEVLKKFPKENHEVFKYVISHLNKVSHNNKVNLMTSENL

SEQ ID NO: 97 - protein, 41 aa, synthetic construct
MSKETRRIFLEFHQFFLDRSAHLKVSVPDEMSADLEKRRPE

SEQ ID NO: 98 - protein, 41 aa, synthetic construct
MQFFLDRSAHLKVSVPDEMSADLEKRRPELIPEDLHRHYIQ

SEQ ID NO: 99 - protein, 41 aa, synthetic construct
MSVPDEMSADLEKRRPELIPEDLHRHYIQTMQERVHPEVQR

SEQ ID NO: 100 - protein, 41 aa, synthetic construct
MTKLDAERDKDRLTLEKERTCAEQIVAKIEEVLMTAQAVEE

SEQ ID NO: 101 - protein, 41 aa, synthetic construct
MTLEKERTCAEQIVAKIEEVLMTAQAVEEDKSSTMQYVILM

SEQ ID NO: 102 - protein, 41 aa, synthetic construct
MTCAEQIVAKIEEVLMTAQAVEEDKSSTMQYVILMYMKHLG

SEQ ID NO: 103 - protein, 41 aa, synthetic construct
MVLMTAQAVEEDKSSTMQYVILMYMKHLGVKVKEPRNLEHK

SEQ ID NO: 104 - protein, 41 aa, synthetic construct
MQLKDIIPTQMQRLTKYPLLLDNIAKYTEWPTEREKVKKAA

SEQ ID NO: 105 - protein, 41 aa, synthetic construct
MKYTEWPTEREKVKKAADHCRQILNYVNQAVKEAENKQRLE

SEQ ID NO: 106 - protein, 41 aa, synthetic construct
MTEREKVKKAADHCRQILNYVNQAVKEAENKQRLEDYQRRL

SEQ ID NO: 107 - protein, 41 aa, synthetic construct
MCRQILNYVNQAVKEAENKQRLEDYQRRLDTSSLKLSEYPN

SEQ ID NO: 108 - protein, 41 aa, synthetic construct
MYVNQAVKEAENKQRLEDYQRRLDTSSLKLSEYPNVEELRN

SEQ ID NO: 109 - protein, 41 aa, synthetic construct
MKEAENKQRLEDYQRRLDTSSLKLSEYPNVEELRNLDLTKR

SEQ ID NO: 110 - protein, 41 aa, synthetic construct
MQRLEDYQRRLDTSSLKLSEYPNVEELRNLDLTKRKMIHEG

SEQ ID NO: 111 - protein, 41 aa, synthetic construct
MDKTIDLYTLLLEDILVLLQKQDDRLVLRCHSKILASTADS

SEQ ID NO: 112 - protein, 41 aa, synthetic construct
MQKQDDRLVLRCHSKILASTADSKHTFSPVIKLSTVLVRQV

SEQ ID NO: 113 - protein, 41 aa, synthetic construct
MTFSPVIKLSTVLVRQVATDNKALFVISMSDNGAQIYELVA

SEQ ID NO: 114 - protein, 41 aa, synthetic construct
MKEQSTKPIPLPQSTPGEGDNDEEDPSKLKEEQHGISVTGL

SEQ ID NO: 115 - protein, 41 aa, synthetic construct
MLESTLISSKPQSHSLSTSGKSEVRDLFVAERQFAKEQHTD

SEQ ID NO: 116 - protein, 41 aa, synthetic construct
MGKSEVRDLFVAERQFAKEQHTDGTLKEVGEDYQIAIPDSH

SEQ ID NO: 117 - protein, 41 aa, synthetic construct
MPGLLLILGKLILLHHKHPERKQAPLTYEKEEEQDQGVSCN

SEQ ID NO: 118 - protein, 41 aa, synthetic construct
MLTYEKEEEQDQGVSCNKVEWWWDCLEMLRENTLVTLANIS

SEQ ID NO: 119 - protein, 41 aa, synthetic construct
MATPPFSRLEKLYSTMVRFLSDRKNPVCREMAVVLLANLAQ

SEQ ID NO: 120 - protein, 41 aa, synthetic construct
MSTMVRFLSDRKNPVCREMAVVLLANLAQGDSLAARAIAVQ

SEQ ID NO: 121 - protein, 41 aa, synthetic construct
MEDNGVLICEYVDQDSYREIICHLTLPDVLLVISTLEVLYM

SEQ ID NO: 122 - protein, 41 aa, synthetic construct
MICEYVDQDSYREIICHLTLPDVLLVISTLEVLYMLTEMGD

SEQ ID NO: 123 - protein, 41 aa, synthetic construct
MNAHFEVNPDCSVSRAEMYSEYLSTCSKLARGGILTSTGFY

SEQ ID NO: 124 - protein, 41 aa, synthetic construct
MPVQTLPATQASPAGQSSCTTATPPFKGDKIICQKEEEAKE

SEQ ID NO: 125 - protein, 41 aa, synthetic construct
MTTATPPFKGDKIICQKEEEAKEATGLHVHERKIEVMENPS

SEQ ID NO: 126 - protein, 41 aa, synthetic construct
MFKGDKIICQKEEEAKEATGLHVHERKIEVMENPSCRRGAT

SEQ ID NO: 127 - protein, 41 aa, synthetic construct
MFQRQRFSFITHLQDKHCSKDALLAGLKQDEPGQAGSQKSS

SEQ ID NO: 128 - protein, 41 aa, synthetic construct
MSFITHLQDKHCSKDALLAGLKQDEPGQAGSQKSSTKQPTV

SEQ ID NO: 129 - protein, 41 aa, synthetic construct
MGSRNLVFRDFTDEKEGPITKHIRLTAALILKNIGKYSECG

SEQ ID NO: 130 - protein, 41 aa, synthetic construct
MFRDFTDEKEGPITKHIRLTAALILKNIGKYSECGRRLLKR

SEQ ID NO: 131 - protein, 41 aa, synthetic construct
MEKEGPITKHIRLTAALILKNIGKYSECGRRLLKRHENNLS

SEQ ID NO: 132 - protein, 41 aa, synthetic construct
MTKHIRLTAALILKNIGKYSECGRRLLKRHENNLSVLAISN

SEQ ID NO: 133 - protein, 41 aa, synthetic construct
MGPLARVPPTAAVAQVFERGNMNSEPEEEDGGLEDEDGDDE

SEQ ID NO: 134 - protein, 41 aa, synthetic construct
MPPTAAVAQVFERGNMNSEPEEEDGGLEDEDGDDEVAEVAE

SEQ ID NO: 135 - protein, 41 aa, synthetic construct
MKASEQESEGSKAAHGGHSGGGSEGHKLPLSSPIFPGLYSG

SEQ ID NO: 136 - protein, 41 aa, synthetic construct
MHKLPLSSPIFPGLYSGSLCNSGLNSRLPAGYSHSLQYLKN

SEQ ID NO: 137 - protein, 41 aa, synthetic construct
MKLPGRISLFTLKKDALQWSRHPATVEGEEPEDTADVESCG

SEQ ID NO: 138 - protein, 41 aa, synthetic construct
MEDTADVESCGSNEASTVSGENDVSLDETSSNASCSTESQS

SEQ ID NO: 139 - protein, 41 aa, synthetic construct
MQKLGLTKEESLQQNVGQEEAEIKSGLCVPGESVRIQRGPA

SEQ ID NO: 140 - protein, 41 aa, synthetic construct
MKEESLQQNVGQEEAEIKSGLCVPGESVRIQRGPATRQRDG

SEQ ID NO: 141 - protein, 41 aa, synthetic construct
MDLRTRARRNLYKKQESEQAGVAKDAKSVASDVPLYKDGEA

SEQ ID NO: 142 - protein, 41 aa, synthetic construct
MSCPPMRESDTRQENLKTKALVSNSSLHWIPIPSNDEVVKQ

SEQ ID NO: 143 - protein, 41 aa, synthetic construct
MESDTRQENLKTKALVSNSSLHWIPIPSNDEVVKQPKPESR

SEQ ID NO: 144 - protein, 41 aa, synthetic construct
MHSVNPEDRFCLSSPTEALKMGYTDCKNATGESSSSKEDDT

SEQ ID NO: 145 - protein, 41 aa, synthetic construct
MDRFCLSSPTEALKMGYTDCKNATGESSSSKEDDTDEESTG

SEQ ID NO: 146 - protein, 41 aa, synthetic construct
MSPTEALKMGYTDCKNATGESSSSKEDDTDEESTGDEQESV

SEQ ID NO: 147 - protein, 41 aa, synthetic construct
MTNPDLEEKMESSFGSPSKQESSESLPKEAFLVLSDEEDIS

SEQ ID NO: 148 - protein, 41 aa, synthetic construct
MEKMESSFGSPSKQESSESLPKEAFLVLSDEEDISGEKDES

SEQ ID NO: 149 - protein, 41 aa, synthetic construct
MFGSPSKQESSESLPKEAFLVLSDEEDISGEKDESEVISQN

SEQ ID NO: 150 - protein, 41 aa, synthetic construct
MKITAKGDINQKLQKVIQWLLEEKLCALQCAVFDKTLAELK

SEQ ID NO: 151 - protein, 41 aa, synthetic construct
MDINQKLQKVIQWLLEEKLCALQCAVFDKTLAELKTRVEKI

SEQ ID NO: 152 - protein, 41 aa, synthetic construct
MLLEEKLCALQCAVFDKTLAELKTRVEKIECNKRHKTVLTE

SEQ ID NO: 153 - protein, 41 aa, synthetic construct
MGGLPAQPASTFFSSFLELLKHLVEMDTDQLKLYEEPLSKL

SEQ ID NO: 154 - protein, 41 aa, synthetic construct
MPASTFFSSFLELLKHLVEMDTDQLKLYEEPLSKLIKTLFP

SEQ ID NO: 155 - protein, 41 aa, synthetic construct
MSSFLELLKHLVEMDTDQLKLYEEPLSKLIKTLFPFEAEAY

SEQ ID NO: 156 - protein, 41 aa, synthetic construct
MLLQYFLKFVPAGYESALQVRKVYVRNICKALLDVLGIEVD

SEQ ID NO: 157 - protein, 41 aa, synthetic construct
MKFVPAGYESALQVRKVYVRNICKALLDVLGIEVDAEYLLG

SEQ ID NO: 158 - protein, 41 aa, synthetic construct
MANVFDFPDLNRFLTRTLQVLLPDLAAKASPAASALIRTLG

SEQ ID NO: 159 - protein, 41 aa, synthetic construct
MPDLNRFLTRTLQVLLPDLAAKASPAASALIRTLGKQLNVN

SEQ ID NO: 160 - protein, 41 aa, synthetic construct
MLTRTLQVLLPDLAAKASPAASALIRTLGKQLNVNRREILI

SEQ ID NO: 161 - protein, 41 aa, synthetic construct
MVLLPDLAAKASPAASALIRTLGKQLNVNRREILINNFKYI

SEQ ID NO: 162 - protein, 41 aa, synthetic construct
MAYGLLMELTRAYLAYADNSRAQDSAAYAIQELLSIYDCRE

SEQ ID NO: 163 - protein, 41 aa, synthetic construct
MLAYADNSRAQDSAAYAIQELLSIYDCREMETNGPGHQLWR

SEQ ID NO: 164 - protein, 41 aa, synthetic construct
MSVRLGQLLLSAKKRDITAFYDSLKLVRAEQIVPLSAASFE

SEQ ID NO: 165 - protein, 41 aa, synthetic construct
MLLLSAKKRDITAFYDSLKLVRAEQIVPLSAASFERGSYQR

SEQ ID NO: 166 - protein, 41 aa, synthetic construct
MIVPLSAASFERGSYQRGYEYIVRLHMLCELEHSIKPLFQH

SEQ ID NO: 167 - protein, 41 aa, synthetic construct
MEYIVRLHMLCELEHSIKPLFQHSPGDSSQEDSLNWVARLE

SEQ ID NO: 168 - protein, 41 aa, synthetic construct
MDFKKKVIKMEQQYESSSDGTEKLPEREEICHFPKGIKQIK

SEQ ID NO: 169 - protein, 41 aa, synthetic construct
MIKMEQQYESSSDGTEKLPEREEICHFPKGIKQIKNGTTDG

SEQ ID NO: 170 - protein, 41 aa, synthetic construct
MYESSSDGTEKLPEREEICHFPKGIKQIKNGTTDGEKKSKK

SEQ ID NO: 171 - protein, 41 aa, synthetic construct
MIGYEMYRNLAQGRNVKSRKLKEIFNKALVDPGPDFVVCDE

SEQ ID NO: 172 - protein, 41 aa, synthetic construct
MRNLAQGRNVKSRKLKEIFNKALVDPGPDFVVCDEGHILKN

SEQ ID NO: 173 - protein, 41 aa, synthetic construct
MRNVKSRKLKEIFNKALVDPGPDFVVCDEGHILKNEASAVS

SEQ ID NO: 174 - protein, 41 aa, synthetic construct
MKAGAKLFQDFQMLSRIWTHPWCLQLDYISKENKGYFDEDS

SEQ ID NO: 175 - protein, 41 aa, synthetic construct
MLDYISKENKGYFDEDSMDEFIASDSDETSMSLSSDDYTKK

SEQ ID NO: 176 - protein, 41 aa, synthetic construct
MSDETSMSLSSDDYTKKKKKGKKGKKDSSSSGSGSDNDVEV

SEQ ID NO: 177 - protein, 41 aa, synthetic construct
MAEVLEHSGKMVLLFEILRMAEEIGDKVLVFSQSLISLDLI

SEQ ID NO: 178 - protein, 41 aa, synthetic construct
MSGKMVLLFEILRMAEEIGDKVLVFSQSLISLDLIEDFLEL

SEQ ID NO: 179 - protein, 41 aa, synthetic construct
MASWNPSYDIQSIFRVYRFGQTKPVYVYRFLAQGTMEDKIY

SEQ ID NO: 180 - protein, 41 aa, synthetic construct
MYDIQSIFRVYRFGQTKPVYVYRFLAQGTMEDKIYDRQVTK

SEQ ID NO: 181 - protein, 41 aa, synthetic construct
MLSFRVVDQQQVERHFTMNELTELYTFEPDLLDDPNSEKKK

SEQ ID NO: 182 - protein, 41 aa, synthetic construct
MLILFNSPEYQRLRIDPINERSFICNYKEHWFTVRKLGKQW

SEQ ID NO: 183 - protein, 41 aa, synthetic construct
MRIDPINERSFICNYKEHWFTVRKLGKQWFNLNSLLTGPEL

SEQ ID NO: 184 - protein, 41 aa, synthetic construct
MERSFICNYKEHWFTVRKLGKQWFNLNSLLTGPELISDTYL

SEQ ID NO: 185 - protein, 41 aa, synthetic construct
MNYKEHWFTVRKLGKQWFNLNSLLTGPELISDTYLALFLAQ

SEQ ID NO: 186 - protein, 41 aa, synthetic construct
MFTVRKLGKQWFNLNSLLTGPELISDTYLALFLAQLQQEGY

SEQ ID NO: 187 - protein, 41 aa, synthetic construct
MASKQKNEESKKRQWALEDFEIGRPLGKGKFGNVYLAREKQ

SEQ ID NO: 188 - protein, 41 aa, synthetic construct
MEESKKRQWALEDFEIGRPLGKGKFGNVYLAREKQSKFILA

SEQ ID NO: 189 - protein, 41 aa, synthetic construct
MILRLYGYFHDATRVYLILEYAPLGTVYRELQKLSKFDEQR

SEQ ID NO: 190 - protein, 41 aa, synthetic construct
MYFHDATRVYLILEYAPLGTVYRELQKLSKFDEQRTATYIT

SEQ ID NO: 191 - protein, 41 aa, synthetic construct
MTVYRELQKLSKFDEQRTATYITELANALSYCHSKRVIHRD

SEQ ID NO: 192 - protein, 41 aa, synthetic construct
MQKLSKFDEQRTATYITELANALSYCHSKRVIHRDIKPENL

SEQ ID NO: 193 - protein, 41 aa, synthetic construct
MDAPRPPVPGEEGELVSTDPRPASYSFCSGKGVGIKGETST

SEQ ID NO: 194 - protein, 41 aa, synthetic construct
MVPGEEGELVSTDPRPASYSFCSGKGVGIKGETSTATPRRS

SEQ ID NO: 195 - protein, 41 aa, synthetic construct
MELVSTDPRPASYSFCSGKGVGIKGETSTATPRRSDLDLGY

SEQ ID NO: 196 - protein, 41 aa, synthetic construct
MGRLPQKLLLETAAPRVSSSRRYSEGREFRYGSWREPVNPY

SEQ ID NO: 197 - protein, 41 aa, synthetic construct
MLLLETAAPRVSSSRRYSEGREFRYGSWREPVNPYYVNAGY

SEQ ID NO: 198 - protein, 41 aa, synthetic construct
MAPRVSSSRRYSEGREFRYGSWREPVNPYYVNAGYALAPAT

SEQ ID NO: 199 - protein, 41 aa, synthetic construct
MDTLSLTDSSVDGIPPYRIRKQHRREMQESVQVNGRVPLPH

SEQ ID NO: 200 - protein, 41 aa, synthetic construct
MIPPYRIRKQHRREMQESVQVNGRVPLPHIPRTYRVPKEVR

SEQ ID NO: 201 - protein, 41 aa, synthetic construct
MCFLVHIDLPLFFPRDQPTLTFQSVYHFTNSGQLYSQAQKN

SEQ ID NO: 202 - protein, 41 aa, synthetic construct
MDLPLFFPRDQPTLTFQSVYHFTNSGQLYSQAQKNYPYSPR

SEQ ID NO: 203 - protein, 41 aa, synthetic construct
MLTFQSVYHFTNSGQLYSQAQKNYPYSPRWDGNEMAKRAKA

SEQ ID NO: 204 - protein, 41 aa, synthetic construct
MMSTPPPASELPQPQPQPQALHYALANAQQVQIHQIGEDGQ

SEQ ID NO: 205 - protein, 41 aa, synthetic construct
MANAQQVQIHQIGEDGQVQVIPQGHLHIAQVPQGEQVQITQ

SEQ ID NO: 206 - protein, 41 aa, synthetic construct
MQIHQIGEDGQVQVIPQGHLHIAQVPQGEQVQITQDSEGNL

SEQ ID NO: 207 - protein, 41 aa, synthetic construct
MEDGQVQVIPQGHLHIAQVPQGEQVQITQDSEGNLQIHHVG

SEQ ID NO: 208 - protein, 41 aa, synthetic construct
MCSSVDLGPTLSRMKDFTKGFSPESKGYAIGNAPELAKAHN

SEQ ID NO: 209 - protein, 41 aa, synthetic construct
MGPTLSRMKDFTKGFSPESKGYAIGNAPELAKAHNSHARPE

SEQ ID NO: 210 - protein, 41 aa, synthetic construct
MPITGRLFELDGLKVYPIDHGPWGEDEEWTDKARRVIMERI

SEQ ID NO: 211 - protein, 41 aa, synthetic construct
MKVYPIDHGPWGEDEEWTDKARRVIMERIGLATAGEPYHDI

SEQ ID NO: 212 - protein, 41 aa, synthetic construct
MDEEWTDKARRVIMERIGLATAGEPYHDIRFNLMAVVPDRR

SEQ ID NO: 213 - protein, 41 aa, synthetic construct
MKARRVIMERIGLATAGEPYHDIRFNLMAVVPDRRIKYEAR

SEQ ID NO: 214 - protein, 41 aa, synthetic construct
MRVPVRPPQQYSDDEDDYEDDEEDDVQNTNSALRYKGKGTG

SEQ ID NO: 215 - protein, 41 aa, synthetic construct
MDDEEDDVQNTNSALRYKGKGTGKPGALSGSADGQLSVLQP

SEQ ID NO: 216 - protein, 41 aa, synthetic construct
MSVISSPQINGEIDLLASGSLTESECFGSLTEVSLPLAEQI

SEQ ID NO: 217 - protein, 41 aa, synthetic construct
MDLLASGSLTESECFGSLTEVSLPLAEQIESPDTKSRNEVV

SEQ ID NO: 218 - protein, 41 aa, synthetic construct
MVVVPGDAVQSTLKCMLGILNGCWILKFEWVKACLRRKVCE

SEQ ID NO: 219 - protein, 41 aa, synthetic construct
MPSGVTEDDVAIHSNSRRSPLVPGIITVIDTETVGEGQVLV

SEQ ID NO: 220 - protein, 41 aa, synthetic construct
MPLVPGIITVIDTETVGEGQVLVSEDSDSDGIVAHFPAHEK

SEQ ID NO: 221 - protein, 41 aa, synthetic construct
MHMSSMEHTEEGLRERLADAMAESPSRDVVGSGTELQREGS

SEQ ID NO: 222 - protein, 41 aa, synthetic construct
MHTEEGLRERLADAMAESPSRDVVGSGTELQREGSIETLSN

SEQ ID NO: 223 - protein, 41 aa, synthetic construct
MAKKILSREDTEEISCRTSSRKRAGKLLDYLQENPKGLDTL

SEQ ID NO: 224 - protein, 41 aa, synthetic construct
MREDTEEISCRTSSRKRAGKLLDYLQENPKGLDTLVESIRR

SEQ ID NO: 225 - protein, 41 aa, synthetic construct
MISCRTSSRKRAGKLLDYLQENPKGLDTLVESIRREKTQNF

SEQ ID NO: 226 - protein, 41 aa, synthetic construct
MSRKRAGKLLDYLQENPKGLDTLVESIRREKTQNFLIQKIT

SEQ ID NO: 227 - protein, 41 aa, synthetic construct
MSPKSKQEVMVRPPTVMSPSGNPQLDSKFSNQGKQGGSASQ

SEQ ID NO: 228 - protein, 41 aa, synthetic construct
MPTVMSPSGNPQLDSKFSNQGKQGGSASQSQPSPCDSKSGG

SEQ ID NO: 229 - protein, 41 aa, synthetic construct
MAQKTPAKVVYVFSTEMANKAAEAVLKGQVETIVSFHIQNI

SEQ ID NO: 230 - protein, 41 aa, synthetic construct
MKVVYVFSTEMANKAAEAVLKGQVETIVSFHIQNISNNKTE

SEQ ID NO: 231 - protein, 41 aa, synthetic construct
MNPGVLDGPQKKPEGPIQAMMAQSQSLGKGPGPRTDVGAPF

SEQ ID NO: 232 - protein, 41 aa, synthetic construct
MGPQKKPEGPIQAMMAQSQSLGKGPGPRTDVGAPFGPQGHR

SEQ ID NO: 233 - protein, 41 aa, synthetic construct
MPFSPDEMVPPSMNSQSGTIGPDHLDHMTPEQIAWLKLQQE

SEQ ID NO: 234 - protein, 41 aa, synthetic construct
MRIPVEGPLSPSRGDFPKGIPPQMGPGRELEFGMVPSGMKG

SEQ ID NO: 235 - protein, 41 aa, synthetic construct
MGDFPKGIPPQMGPGRELEFGMVPSGMKGDVNLNVNMGSNS

SEQ ID NO: 236 - protein, 41 aa, synthetic construct
MPGRELEFGMVPSGMKGDVNLNVNMGSNSQMIPQKMREAGA

SEQ ID NO: 237 - protein, 41 aa, synthetic construct
MPMLIPHTPIEITKEEKPERRSRSHERARYEDPTLRNRFSE

SEQ ID NO: 238 - protein, 41 aa, synthetic construct
MTPIEITKEEKPERRSRSHERARYEDPTLRNRFSEILETSS

SEQ ID NO: 239 - protein, 41 aa, synthetic construct
MQGKTVVKSDKLVYVDLLREEPDAKTDTNVSKPSFAAESVG

SEQ ID NO: 240 - protein, 41 aa, synthetic construct
MRILCYEKCYNKTKIPKEDGESTDRLMGKGQVQLDPQALQD

SEQ ID NO: 241 - protein, 41 aa, synthetic construct
MKCYNKTKIPKEDGESTDRLMGKGQVQLDPQALQDRDWQRT

SEQ ID NO: 242 - protein, 41 aa, synthetic construct
MKIPKEDGESTDRLMGKGQVQLDPQALQDRDWQRTVIAMNG

SEQ ID NO: 243 - protein, 41 aa, synthetic construct
MGEVADEDKRIITDDEIISLSIEFFDQNRLDRKVNKDKEKS

SEQ ID NO: 244 - protein, 41 aa, synthetic construct
MDKRIITDDEIISLSIEFFDQNRLDRKVNKDKEKSKEEVND

SEQ ID NO: 245 - protein, 41 aa, synthetic construct
MDDEIISLSIEFFDQNRLDRKVNKDKEKSKEEVNDKRYLRC

SEQ ID NO: 246 - protein, 41 aa, synthetic construct
MDRSSSAPNVHINTIEPVNIDDLIRDQGFRGDGGSTTGLSA

SEQ ID NO: 247 - protein, 41 aa, synthetic construct
MPNVHINTIEPVNIDDLIRDQGFRGDGGSTTGLSATPPASL

SEQ ID NO: 248 - protein, 41 aa, synthetic construct
MIDDLIRDQGFRGDGGSTTGLSATPPASLPGSLTNVKALQK

SEQ ID NO: 249 - protein, 41 aa, synthetic construct
MDGGSTTGLSATPPASLPGSLTNVKALQKSPGPQRERKSSS

SEQ ID NO: 250 - protein, 41 aa, synthetic construct
MCEQKEENQGKNESNIKPVQTVNITAGFPVVGQKDKPVDNA

SEQ ID NO: 251 - protein, 41 aa, synthetic construct
MSNIKPVQTVNITAGFPVVGQKDKPVDNAKCSIKGGSRFCL

SEQ ID NO: 252 - protein, 41 aa, synthetic construct
MENNQEEQSMDSNLGEAASGCESETSVSEDCSGLSSQSDIL

SEQ ID NO: 253 - protein, 41 aa, synthetic construct
MQSMDSNLGEAASGCESETSVSEDCSGLSSQSDILTTQQRD

SEQ ID NO: 254 - protein, 41 aa, synthetic construct
MGNSFKVNSCKDHIGKSMPNVLEDEVYETVVDTSEEDSFSL

SEQ ID NO: 255 - protein, 41 aa, synthetic construct
MDTSEEDSFSLCFSKCRTKNLQKVRTSKTRKKIFHEANADE

SEQ ID NO: 256 - protein, 41 aa, synthetic construct
MLACEWSQLTLSGLNGAQMEKIPLLHISSCDQNISEKDLLD

SEQ ID NO: 257 - protein, 41 aa, synthetic construct
MQLTLSGLNGAQMEKIPLLHISSCDQNISEKDLLDTENKRK

SEQ ID NO: 258 - protein, 41 aa, synthetic construct
MLNGAQMEKIPLLHISSCDQNISEKDLLDTENKRKKDFLTS

SEQ ID NO: 259 - protein, 41 aa, synthetic construct
MEKIPLLHISSCDQNISEKDLLDTENKRKKDFLTSENSLPR

SEQ ID NO: 260 - protein, 41 aa, synthetic construct
MSDIKEEVLAAACHPVQHSKVEYSDTDFQSQKSLLYDHENA

SEQ ID NO: 261 - protein, 41 aa, synthetic construct
MHPVQHSKVEYSDTDFQSQKSLLYDHENASTLILTPTSKDV

SEQ ID NO: 262 - protein, 41 aa, synthetic construct
MSKDVLSNLVMISRGKESYKMSDKLKGNNYESDVELTKNIP

SEQ ID NO: 263 - protein, 41 aa, synthetic construct
MNLVMISRGKESYKMSDKLKGNNYESDVELTKNIPMEKNQD

SEQ ID NO: 264 - protein, 41 aa, synthetic construct
MRGKESYKMSDKLKGNNYESDVELTKNIPMEKNQDVCALNE

SEQ ID NO: 265 - protein, 41 aa, synthetic construct
MQNTNLRVIQKNQEETTSISKITVNPDSEELFSDNENNFVF

SEQ ID NO: 266 - protein, 41 aa, synthetic construct
MVIQKNQEETTSISKITVNPDSEELFSDNENNFVFQVANER

SEQ ID NO: 267 - protein, 41 aa, synthetic construct
MEPIFKNSTMVLYGDTGDKQATQVSIKKDLVYVLAEENKNS

SEQ ID NO: 268 - protein, 41 aa, synthetic construct
MSTMVLYGDTGDKQATQVSIKKDLVYVLAEENKNSVKQHIK

SEQ ID NO: 269 - protein, 41 aa, synthetic construct
MGDTGDKQATQVSIKKDLVYVLAEENKNSVKQHIKMTLGQD

SEQ ID NO: 270 - protein, 41 aa, synthetic construct
MKDETDLLFTDQHNICLKLSGQFMKEGNTQIKEDLSDLTFL

SEQ ID NO: 271 - protein, 41 aa, synthetic construct
MNICLKLSGQFMKEGNTQIKEDLSDLTFLEVAKAQEACHGN

SEQ ID NO: 272 - protein, 41 aa, synthetic construct
MNQSPYSVIENSALAFYTSCSRKTSVSQTSLLEAKKWLREG

SEQ ID NO: 273 - protein, 41 aa, synthetic construct
MDGQPERINTADYVGNYLYENNSNSTIAENDKNHLSEKQDT

SEQ ID NO: 274 - protein, 41 aa, synthetic construct
MINTADYVGNYLYENNSNSTIAENDKNHLSEKQDTYLSNSS

SEQ ID NO: 275 - protein, 41 aa, synthetic construct
MVGNYLYENNSNSTIAENDKNHLSEKQDTYLSNSSMSNSYS

SEQ ID NO: 276 - protein, 41 aa, synthetic construct
MNINLEENRQKQNIDGHGSDDSKNKINDNEIHQFNKNNSNQ

SEQ ID NO: 277 - protein, 41 aa, synthetic construct
MNRQKQNIDGHGSDDSKNKINDNEIHQFNKNNSNQAAAVTF

SEQ ID NO: 278 - protein, 41 aa, synthetic construct
MIDGHGSDDSKNKINDNEIHQFNKNNSNQAAAVTFTKCEEE

SEQ ID NO: 279 - protein, 41 aa, synthetic construct
MTSKSKSKSERANIQLAATKKTQYQQLPVSDEILFQIYQPR

SEQ ID NO: 280 - protein, 41 aa, synthetic construct
MLDPDFQPSCSEVDLIGFVVSVVKKTGLAPFVYLSDECYNL

SEQ ID NO: 281 - protein, 41 aa, synthetic construct
MEIYYQSPLSLCMAKRKSVSTPVSAQMTSKSCKGEKEIDDQ

SEQ ID NO: 282 - protein, 41 aa, synthetic construct
MPLSLCMAKRKSVSTPVSAQMTSKSCKGEKEIDDQKNCKKR

SEQ ID NO: 283 - protein, 41 aa, synthetic construct
MSSSQHISIEGQKEEERYERIEIPIHIVPHVTIGKVCLESA

SEQ ID NO: 284 - protein, 41 aa, synthetic construct
MEEERYERIEIPIHIVPHVTIGKVCLESAVELPKILCQEEQ

SEQ ID NO: 285 - protein, 41 aa, synthetic construct
MGHDSSLFEDKNDHDKHKDRKRKKRKKGEKQIPGEEKGRKR

SEQ ID NO: 286 - protein, 41 aa, synthetic construct
MFEDKNDHDKHKDRKRKKRKKGEKQIPGEEKGRKRRRVKED

SEQ ID NO: 287 - protein, 41 aa, synthetic construct
MDKRNKVTPVLYLNYGPYSSYAPHYDSTFANISKDDSDLIY

SEQ ID NO: 288 - protein, 41 aa, synthetic construct
MTPVLYLNYGPYSSYAPHYDSTFANISKDDSDLIYSTYGED

SEQ ID NO: 289 - protein, 41 aa, synthetic construct
MGEEEESEEERSGSQTESEEESSEMDDEDYERRRSECVSEM

SEQ ID NO: 290 - protein, 41 aa, synthetic construct
MEEERSGSQTESEEESSEMDDEDYERRRSECVSEMLDLEKQ

SEQ ID NO: 291 - protein, 41 aa, synthetic construct
MVSEMLDLEKQFSELKEKLFRERLSQLRLRLEEVGAERAPE

SEQ ID NO: 292 - protein, 41 aa, synthetic construct
MARGSSRSWDSLPPSKRKKAPLVSGPYIVYMLQEIDILEDW

SEQ ID NO: 293 - protein, 41 aa, synthetic construct
MAPLVSGPYIVYMLQEIDILEDWTAIKKARAAVSPQKRKSD

SEQ ID NO: 294 - protein, 41 aa, synthetic construct
MNEPLDMYSYLHNQGIGVSLAQFYISWAEEYEARENFRKAD

SEQ ID NO: 295 - protein, 41 aa, synthetic construct
MFQEGIQQKAEPLERLQSQHRQFQARVSRQTLLALEKEEEE

SEQ ID NO: 296 - protein, 41 aa, synthetic construct
MQKAEPLERLQSQHRQFQARVSRQTLLALEKEEEEEVFESS

SEQ ID NO: 297 - protein, 41 aa, synthetic construct
MATHSSGFSGSSASVASTSSIKCLQIPEKLELTNETSENPT

SEQ ID NO: 298 - protein, 41 aa, synthetic construct
MIPEKLELTNETSENPTQSPWCSQYRRQLLKSLPELSASAE

SEQ ID NO: 299 - protein, 41 aa, synthetic construct
MLTNETSENPTQSPWCSQYRRQLLKSLPELSASAELCIEDR

SEQ ID NO: 300 - protein, 41 aa, synthetic construct
MSLPELSASAELCIEDRPMPKLEIEKEIELGNEDYCIKREY

SEQ ID NO: 301 - protein, 41 aa, synthetic construct
MIEDRPMPKLEIEKEIELGNEDYCIKREYLICEDYKLFWVA

SEQ ID NO: 302 - protein, 41 aa, synthetic construct
MPKLEIEKEIELGNEDYCIKREYLICEDYKLFWVAPRNSAE

SEQ ID NO: 303 - protein, 41 aa, synthetic construct
MFWVAPRNSAELTVIKVSSQPVPWDFYINLKLKERLNEDFD

SEQ ID NO: 304 - protein, 41 aa, synthetic construct
MFTIPHPLSDNLFKPKERCISEKEMHMRSKRIYDNLPEVKK

SEQ ID NO: 305 - protein, 41 aa, synthetic construct
MLSDNLFKPKERCISEKEMHMRSKRIYDNLPEVKKKKEEQR

SEQ ID NO: 306 - protein, 41 aa, synthetic construct
MFAFHKGSYLRNGWNVMDFVVVLTGILATVGTEFDLRTLRA

SEQ ID NO: 307 - protein, 41 aa, synthetic construct
MSYLRNGWNVMDFVVVLTGILATVGTEFDLRTLRAVRVLRP

SEQ ID NO: 308 - protein, 41 aa, synthetic construct
MKHRMNTVMLQLEEVERERDQAFHSRDEAQTQYSQCLIEKD

SEQ ID NO: 309 - protein, 41 aa, synthetic construct
MVMLQLEEVERERDQAFHSRDEAQTQYSQCLIEKDKYRKQI

SEQ ID NO: 310 - protein, 41 aa, synthetic construct
MEVERERDQAFHSRDEAQTQYSQCLIEKDKYRKQIRELEEK

SEQ ID NO: 311 - protein, 41 aa, synthetic construct
MCKSDIVTRDEFLRRQKTETIIYSREKNPNAFECIAPANIE

SEQ ID NO: 312 - protein, 41 aa, synthetic construct
MTRDEFLRRQKTETIIYSREKNPNAFECIAPANIEAVAAKN

SEQ ID NO: 313 - protein, 41 aa, synthetic construct
MAAKNKHCLLEAGIGCTRDLIKSNIYPIVLFIRVCEKNIKR

SEQ ID NO: 314 - protein, 41 aa, synthetic construct
MIGCTRDLIKSNIYPIVLFIRVCEKNIKRFRKLLPRPETEE

SEQ ID NO: 315 - protein, 41 aa, synthetic construct
MYPIVLFIRVCEKNIKRFRKLLPRPETEEEFLRVCRLKEKE

SEQ ID NO: 316 - protein, 41 aa, synthetic construct
MFDILRRVLKDYFKFDVFYCMNITDIDDKIIKRARQNHLFE

SEQ ID NO: 317 - protein, 41 aa, synthetic construct
MVLKDYFKFDVFYCMNITDIDDKIIKRARQNHLFEQYREKR

SEQ ID NO: 318 - protein, 41 aa, synthetic construct
MHLFEQYREKRPEAAQLLEDVQAALKPFSVKLNETTDPDKK

SEQ ID NO: 319 - protein, 41 aa, synthetic construct
MKPFSVKLNETTDPDKKQMLERIQHAVQLATEPLEKAVQSR

SEQ ID NO: 320 - protein, 41 aa, synthetic construct
MLNETTDPDKKQMLERIQHAVQLATEPLEKAVQSRLTGEEV

SEQ ID NO: 321 - protein, 41 aa, synthetic construct
MAVQLATEPLEKAVQSRLTGEEVNSCVEVLLEEAKDLLSDW

SEQ ID NO: 322 - protein, 41 aa, synthetic construct
MVQSRLTGEEVNSCVEVLLEEAKDLLSDWLDSTLGCDVTDN

SEQ ID NO: 323 - protein, 41 aa, synthetic construct
MMLFQRLQEKRMLEESNLSFLKELLFRINRLDLLITYLNTR

SEQ ID NO: 324 - protein, 41 aa, synthetic construct
MQEKRMLEESNLSFLKELLFRINRLDLLITYLNTRKEEMER

SEQ ID NO: 325 - protein, 41 aa, synthetic construct
MEESNLSFLKELLFRINRLDLLITYLNTRKEEMERELQTPG

SEQ ID NO: 326 - protein, 41 aa, synthetic construct
MDAFQPHHHHHHHLSPHPPGTVDKKMVEKCWKLMDKVVRLC

SEQ ID NO: 327 - protein, 41 aa, synthetic construct
MSGLEAMALKSTIDLTCNDYISVFEFDIFTRLFQPWSSLLR

SEQ ID NO: 328 - protein, 41 aa, synthetic construct
MYISVFEFDIFTRLFQPWSSLLRNWNSLAVTHPGYMAFLTY

SEQ ID NO: 329 - protein, 41 aa, synthetic construct
MDGIITIVDSKYGLKHLTEEKPDGLINEATRQVALADIILI

SEQ ID NO: 330 - protein, 41 aa, synthetic construct
MVDSKYGLKHLTEEKPDGLINEATRQVALADIILINKTDLV

SEQ ID NO: 331 - protein, 41 aa, synthetic construct
MLKHLTEEKPDGLINEATRQVALADIILINKTDLVPEEDVK

SEQ ID NO: 332 - protein, 41 aa, synthetic construct
MEKPDGLINEATRQVALADIILINKTDLVPEEDVKKLRTTI

SEQ ID NO: 333 - protein, 41 aa, synthetic construct
MNRLASLQQENKVLKIELETYKLKCKALQEENRDLRKASVT

SEQ ID NO: 334 - protein, 41 aa, synthetic construct
MQQENKVLKIELETYKLKCKALQEENRDLRKASVTIQARAE

SEQ ID NO: 335 - protein, 41 aa, synthetic construct
MHPRRVSIPGHCCEQWVCEDDAKRPRKTAPRDTGAFDAVGE

SEQ ID NO: 336 - protein, 41 aa, synthetic construct
MIPGHCCEQWVCEDDAKRPRKTAPRDTGAFDAVGEVEAWHR

SEQ ID NO: 337 - protein, 41 aa, synthetic construct
MRQMEMKILRALNFGLGRPLPLHFLRRASKIGEVDVEQHTL

SEQ ID NO: 338 - protein, 41 aa, synthetic construct
MFGLGRPLPLHFLRRASKIGEVDVEQHTLAKYLMELTMLDY

SEQ ID NO: 339 - protein, 41 aa, synthetic construct
MPDCLRACQEQIEALLESSLRQAQQNMDPKAAEEEEEEEEE

SEQ ID NO: 340 - protein, 41 aa, synthetic construct
MCQEQIEALLESSLRQAQQNMDPKAAEEEEEEEEEVDLACT

SEQ ID NO: 341 - protein, 41 aa, synthetic construct
MSASRSRSRTRSRSRSHTPRRHYNNRRSRSGTYSSRSRSRS

SEQ ID NO: 342 - protein, 41 aa, synthetic construct
MSRTRSRSRSHTPRRHYNNRRSRSGTYSSRSRSRSRSHSES

SEQ ID NO: 343 - protein, 41 aa, synthetic construct
MTYSSRSRSRSRSHSESPRRHHNHGSPHLKAKHTRDDLKSS

SEQ ID NO: 344 - protein, 41 aa, synthetic construct
MHSESPRRHHNHGSPHLKAKHTRDDLKSSNRHGHKRKKSRS

SEQ ID NO: 345 - protein, 41 aa, synthetic construct
MPLESLGWDVAELQLNHTGPQQDPRLYWQGGPALGRSFLHG

SEQ ID NO: 346 - protein, 41 aa, synthetic construct
MPALGRSFLHGPELDKGQLRIHRDGIYMVHIQVTLAICSST

SEQ ID NO: 347 - protein, 41 aa, synthetic construct
MWMVALLLLLSAEPVPAARSEDRYRNPKGSACSRIWQSPRF

SEQ ID NO: 348 - protein, 41 aa, synthetic construct
MLLLSAEPVPAARSEDRYRNPKGSACSRIWQSPRFIARKRG

SEQ ID NO: 349 - protein, 41 aa, synthetic construct
MEGASARKTQTPAAQPVPRPVSQARPPPNQKKGSRTPIIII

SEQ ID NO: 350 - protein, 41 aa, synthetic construct
MKTQTPAAQPVPRPVSQARPPPNQKKGSRTPIIIIPAATTS

SEQ ID NO: 351 - protein, 41 aa, synthetic construct
MEVDNLYNIEILRLPKALREMNWLDYFALGGNKQALEEAAT

SEQ ID NO: 352 - protein, 41 aa, synthetic construct
MEMNWLDYFALGGNKQALEEAATADLDITEINKLTAEAIQT

SEQ ID NO: 353 - protein, 41 aa, synthetic construct
MVISVVTTGLDRESFPAYTLVVQAADLQGEGLSTTATAVIT

SEQ ID NO: 354 - protein, 41 aa, synthetic construct
MLVVQAADLQGEGLSTTATAVITVTDTNDNPPIFNPTTYKG

SEQ ID NO: 355 - protein, 41 aa, synthetic construct
MDLQGEGLSTTATAVITVTDTNDNPPIFNPTTYKGQVPENE

SEQ ID NO: 356 - protein, 41 aa, synthetic construct
MLDRRENDERRGSDRSDRLHKHRHHQHRRSRDLLKAKQTEK

SEQ ID NO: 357 - protein, 41 aa, synthetic construct
MDERRGSDRSDRLHKHRHHQHRRSRDLLKAKQTEKEKSQEV

SEQ ID NO: 358 - protein, 41 aa, synthetic construct
MDRSDRLHKHRHHQHRRSRDLLKAKQTEKEKSQEVSSKSGS

SEQ ID NO: 359 - protein, 41 aa, synthetic construct
MHKHRHHQHRRSRDLLKAKQTEKEKSQEVSSKSGSMKDRIS

SEQ ID NO: 360 - protein, 41 aa, synthetic construct
MKKLPRSVKLEKSAPDTELVNVTHLNTEVKNSSDTGKVKLD

SEQ ID NO: 361 - protein, 41 aa, synthetic construct
MVKLDENSEKHLVKDLKAQGTRDSKPIALKEEIVTPKETET

SEQ ID NO: 362 - protein, 41 aa, synthetic construct
MSEKHLVKDLKAQGTRDSKPIALKEEIVTPKETETSEKETP

SEQ ID NO: 363 - protein, 41 aa, synthetic construct
MKICCPRYGERRQTESDWGKRCVDKFDIIGIIGEGTYGQVY

SEQ ID NO: 364 - protein, 41 aa, synthetic construct
MKRCVDKFDIIGIIGEGTYGQVYKAKDKDTGELVALKKVRL

SEQ ID NO: 365 - protein, 41 aa, synthetic construct
MKMAPPDLPHWQDCHELWSKKRRRQRQSGVVVEEPPPSKTS

SEQ ID NO: 366 - protein, 41 aa, synthetic construct
MLPHWQDCHELWSKKRRRQRQSGVVVEEPPPSKTSRKETTS

SEQ ID NO: 367 - protein, 41 aa, synthetic construct
MKKRRRQRQSGVVVEEPPPSKTSRKETTSGTSTEPVKNSSP

SEQ ID NO: 368 - protein, 41 aa, synthetic construct
MLSIPQMAQLLNIHSNPEMQQQLEALNQSISALTEATSQQQ

SEQ ID NO: 369 - protein, 41 aa, synthetic construct
MAQLLNIHSNPEMQQQLEALNQSISALTEATSQQQDSETMA

SEQ ID NO: 370 - protein, 41 aa, synthetic construct
MHSNPEMQQQLEALNQSISALTEATSQQQDSETMAPEESLK

SEQ ID NO: 371 - protein, 41 aa, synthetic construct
MHEHQALRPMEYSTRPRPNRTYGNTDGPETGFSAIDTDERN

SEQ ID NO: 372 - protein, 41 aa, synthetic construct
MDGPETGFSAIDTDERNSGPALTESLVQTLVKNRTFSGSLS

SEQ ID NO: 373 - protein, 41 aa, synthetic construct
MFSAIDTDERNSGPALTESLVQTLVKNRTFSGSLSHLGESS

SEQ ID NO: 374 - protein, 41 aa, synthetic construct
MPTGGGGGGDFDYPGAPAGPGGAVMPGGAHGPPPGYGCAAA

SEQ ID NO: 375 - protein, 41 aa, synthetic construct
MGGDFDYPGAPAGPGGAVMPGGAHGPPPGYGCAAAGYLDGR

SEQ ID NO: 376 - protein, 41 aa, synthetic construct
MEGHTKGPFLVSAPLSTIINWEREFQMWAPKFYVVTYTGDK

SEQ ID NO: 377 - protein, 41 aa, synthetic construct
MFYVVTYTGDKDSRAIIRENEFSFEDNAIKGGKKAFKMKRE

SEQ ID NO: 378 - protein, 41 aa, synthetic construct
MNEFSFEDNAIKGGKKAFKMKREAQVKFHVLLTSYELITID

SEQ ID NO: 379 - protein, 41 aa, synthetic construct
MMNEYLSSFKVAQYVVREEDKIEEIEREIIKQEENVDPDYW

SEQ ID NO: 380 - protein, 41 aa, synthetic construct
MSFKVAQYVVREEDKIEEIEREIIKQEENVDPDYWEKLLRH

SEQ ID NO: 381 - protein, 41 aa, synthetic construct
MDKPLPPLLARVGGNIEVLGFNTRQRKAFLNAVMRWGMPPQ

SEQ ID NO: 382 - protein, 41 aa, synthetic construct
MIILCDTCPRAYHMVCLDPDMEKAPEGKWSCPHCEKEGIQW

SEQ ID NO: 383 - protein, 41 aa, synthetic construct
MCPRAYHMVCLDPDMEKAPEGKWSCPHCEKEGIQWEAKEDN

SEQ ID NO: 384 - protein, 41 aa, synthetic construct
MLFPVAAMEAPKMPNGMYDGSALIRASGKLLLLQKMLKNLK

SEQ ID NO: 385 - protein, 41 aa, synthetic construct
MMEAPKMPNGMYDGSALIRASGKLLLLQKMLKNLKEGGHRV

SEQ ID NO: 386 - protein, 41 aa, synthetic construct
MTDDTELQNMNEYLSSFKVAQYVVREEDGVEEVEREIIKQE

SEQ ID NO: 387 - protein, 41 aa, synthetic construct
MLSSFKVAQYVVREEDGVEEVEREIIKQEENVDPDYWEKLL

SEQ ID NO: 388 - protein, 41 aa, synthetic construct
MEDLARNLGKGKRIRKQVNYNDASQEDQEWQDELSDNQSEY

SEQ ID NO: 389 - protein, 41 aa, synthetic construct
MERAREERPEETEKAPPSPEQLPREEVLPEKEKILDKLELS

SEQ ID NO: 390 - protein, 41 aa, synthetic construct
MKAPPSPEQLPREEVLPEKEKILDKLELSLIHSRGDSSELR

SEQ ID NO: 391 - protein, 41 aa, synthetic construct
MRKRNTSSDNSDVEVMPAQSPREDEESSIQKRRSNRQVKRK

SEQ ID NO: 392 - protein, 41 aa, synthetic construct
MSDNSDVEVMPAQSPREDEESSIQKRRSNRQVKRKKYTEDL

SEQ ID NO: 393 - protein, 41 aa, synthetic construct
MEVMPAQSPREDEESSIQKRRSNRQVKRKKYTEDLDIKITD

SEQ ID NO: 394 - protein, 41 aa, synthetic construct
MEPVIYYLVKWCSLPYEDSTWELKEDVDEGKIREFKRIQSR

SEQ ID NO: 395 - protein, 41 aa, synthetic construct
MLVKWCSLPYEDSTWELKEDVDEGKIREFKRIQSRHPELKR

SEQ ID NO: 396 - protein, 41 aa, synthetic construct
MLPYEDSTWELKEDVDEGKIREFKRIQSRHPELKRVNRPQA

SEQ ID NO: 397 - protein, 41 aa, synthetic construct
MTWELKEDVDEGKIREFKRIQSRHPELKRVNRPQASAWKKL

SEQ ID NO: 398 - protein, 41 aa, synthetic construct
MGIQQFSKKEIEDLLRKGAYAAIMEEDDEGSKFCEEDIDQI

SEQ ID NO: 399 - protein, 41 aa, synthetic construct
MEDDEGSKFCEEDIDQILLRRTTTITIESEGKGSTFAKASF

SEQ ID NO: 400 - protein, 41 aa, synthetic construct
MKFCEEDIDQILLRRTTTITIESEGKGSTFAKASFVASENR

SEQ ID NO: 401 - protein, 41 aa, synthetic construct
MIWDLISPAENGKTKELQNHSGLSIPVPRGRKGKKVKSQST

SEQ ID NO: 402 - protein, 41 aa, synthetic construct
MTKELQNHSGLSIPVPRGRKGKKVKSQSTFDIHKADWIRKY

SEQ ID NO: 403 - protein, 41 aa, synthetic construct
MHSGLSIPVPRGRKGKKVKSQSTFDIHKADWIRKYNPDTLF

SEQ ID NO: 404 - protein, 41 aa, synthetic construct
MKGKKVKSQSTFDIHKADWIRKYNPDTLFQDESYKKHLKHQ

SEQ ID NO: 405 - protein, 41 aa, synthetic construct
MSQSTFDIHKADWIRKYNPDTLFQDESYKKHLKHQCNKVLL

SEQ ID NO: 406 - protein, 41 aa, synthetic construct
MIHKADWIRKYNPDTLFQDESYKKHLKHQCNKVLLRVRMLY

SEQ ID NO: 407 - protein, 41 aa, synthetic construct
MIRKYNPDTLFQDESYKKHLKHQCNKVLLRVRMLYYLRQEV

SEQ ID NO: 408 - protein, 41 aa, synthetic construct
MESYKKHLKHQCNKVLLRVRMLYYLRQEVIGDQAEKVLGGA

SEQ ID NO: 409 - protein, 41 aa, synthetic construct
MLKHQCNKVLLRVRMLYYLRQEVIGDQAEKVLGGAIASEID

SEQ ID NO: 410 - protein, 41 aa, synthetic construct
MFVFFDLTVDDQSVYPKALRDEYIMSKTLGSGACGEVKLAF

SEQ ID NO: 411 - protein, 41 aa, synthetic construct
MTVDDQSVYPKALRDEYIMSKTLGSGACGEVKLAFERKTCK

SEQ ID NO: 412 - protein, 41 aa, synthetic construct
MVYPKALRDEYIMSKTLGSGACGEVKLAFERKTCKKVAIKI

SEQ ID NO: 413 - protein, 41 aa, synthetic construct
MAHFKAHPDWKWCNKDRKKSSSEAKPTSLGLAGGHKETRER

SEQ ID NO: 414 - protein, 41 aa, synthetic construct
MNKDRKKSSSEAKPTSLGLAGGHKETRERSMSETGTAAAPG

SEQ ID NO: 415 - protein, 41 aa, synthetic construct
MNNIAVHVQRAHGGHILYRPKRATEKFEEFLAILKKLPIHR

SEQ ID NO: 416 - protein, 41 aa, synthetic construct
MVQRAHGGHILYRPKRATEKFEEFLAILKKLPIHRTPYEHK

SEQ ID NO: 417 - protein, 41 aa, synthetic construct
MGHILYRPKRATEKFEEFLAILKKLPIHRTPYEHKTVWKFL

SEQ ID NO: 418 - protein, 41 aa, synthetic construct
MLRSNKVKRSQKLVYMGKLKEKESFGEISVLLQVPFTCTII

SEQ ID NO: 419 - protein, 41 aa, synthetic construct
MKRSQKLVYMGKLKEKESFGEISVLLQVPFTCTIITKKEVE

SEQ ID NO: 420 - protein, 41 aa, synthetic construct
MVYMGKLKEKESFGEISVLLQVPFTCTIITKKEVEMAIIED

SEQ ID NO: 421 - protein, 41 aa, synthetic construct
MGSGGLKGEPGDVGPQGPRGVQGPPGPAGKPGRRGRAGSDG

SEQ ID NO: 422 - protein, 41 aa, synthetic construct
MGPQGPRGVQGPPGPAGKPGRRGRAGSDGARGMPGQTGPKG

SEQ ID NO: 423 - protein, 41 aa, synthetic construct
MGSDGARGMPGQTGPKGDRGFDGLAGLPGEKGHRGDPGPSG

SEQ ID NO: 424 - protein, 41 aa, synthetic construct
MGQPGPKGNVGPQGEPGPPGQQGNPGAQGLPGPQGAIGPPG

SEQ ID NO: 425 - protein, 41 aa, synthetic construct
MGPPGEKGPLGKPGLPGMPGADGPPGHPGKEGPPGEKGGQG

SEQ ID NO: 426 - protein, 41 aa, synthetic construct
MHPGNSCSTTTPGPVIQVPEASVTIDLEMWSPGGRICAEKP

SEQ ID NO: 427 - protein, 41 aa, synthetic construct
MPGGRICAEKPADPVDLSPRCNLTVKDLLLSGSSGDLQQHH

SEQ ID NO: 428 - protein, 41 aa, synthetic construct
MEDRVNKFLRRQNHPEAGEVFVRVVASSDKTVEVKPGMKSR

SEQ ID NO: 429 - protein, 41 aa, synthetic construct
MFLRRQNHPEAGEVFVRVVASSDKTVEVKPGMKSRFVDSGE

SEQ ID NO: 430 - protein, 41 aa, synthetic construct
MQGSSMGQMAAQMGQLGQMGQPGLGADSTPNIQQALQQRIL

SEQ ID NO: 431 - protein, 41 aa, synthetic construct
MGQLGQMGQPGLGADSTPNIQQALQQRILQQQQMKQQIGSP

SEQ ID NO: 432 - protein, 41 aa, synthetic construct
MGQPGLGADSTPNIQQALQQRILQQQQMKQQIGSPGQPNPM

SEQ ID NO: 433 - protein, 41 aa, synthetic construct
MPYLRFGCLSCRLFYFKLTDLYKKVKKNSSPPLSLYGQLLW

SEQ ID NO: 434 - protein, 41 aa, synthetic construct
MCLSCRLFYFKLTDLYKKVKKNSSPPLSLYGQLLWREFFYT

SEQ ID NO: 435 - protein, 41 aa, synthetic construct
MDYIRRYLPVLRGFPAKYIYDPWNAPEGIQKVAKCLIGVNY

SEQ ID NO: 436 - protein, 41 aa, synthetic construct
MLPVLRGFPAKYIYDPWNAPEGIQKVAKCLIGVNYPKPMVN

SEQ ID NO: 437 - protein, 41 aa, synthetic construct
MFPAKYIYDPWNAPEGIQKVAKCLIGVNYPKPMVNHAEASR

SEQ ID NO: 438 - protein, 41 aa, synthetic construct
MIYQQLSRYRGLGLLASVPSNPNGNGGFMGYSAENIPGCSS

SEQ ID NO: 439 - protein, 41 aa, synthetic construct
MRYRGLGLLASVPSNPNGNGGFMGYSAENIPGCSSSGSCSQ

SEQ ID NO: 440 - protein, 41 aa, synthetic construct
MEFTIKDRNGKEVATDVRLLPQGTVIFEDISIEHFEGTVTK

SEQ ID NO: 441 - protein, 41 aa, synthetic construct
MRNGKEVATDVRLLPQGTVIFEDISIEHFEGTVTKVIPKVP

SEQ ID NO: 442 - protein, 41 aa, synthetic construct
MNKVSAEKVNKTHSVNGITEEADPTIYSGKVIRPLRSVDPT

SEQ ID NO: 443 - protein, 41 aa, synthetic construct
MSVNGITEEADPTIYSGKVIRPLRSVDPTQTEYQGMIEIVE

SEQ ID NO: 444 - protein, 41 aa, synthetic construct
MIRPLRSVDPTQTEYQGMIEIVEEGDMKGEVYPFGIVGMAN

SEQ ID NO: 445 - protein, 41 aa, synthetic construct
MGFINYEVGDSKKLFFHVKEVQDGIELQAGDEVEFSVILNQ

SEQ ID NO: 446 - protein, 41 aa, synthetic construct
MVGDSKKLFFHVKEVQDGIELQAGDEVEFSVILNQRTGKCS

SEQ ID NO: 447 - protein, 41 aa, synthetic construct
MLFFHVKEVQDGIELQAGDEVEFSVILNQRTGKCSACNVWR

SEQ ID NO: 448 - protein, 41 aa, synthetic construct
MASMIFRKEPFFHGRDNYDQLVRIAKFLGTEDLYGYIDKYN

SEQ ID NO: 449 - protein, 41 aa, synthetic construct
MKEPFFHGRDNYDQLVRIAKFLGTEDLYGYIDKYNIELDPR

SEQ ID NO: 450 - protein, 41 aa, synthetic construct
MNKAAVMVHQLSKKEASRHAIMRSPQMVSAIVRTMQNTNDV

SEQ ID NO: 451 - protein, 41 aa, synthetic construct
MVHQLSKKEASRHAIMRSPQMVSAIVRTMQNTNDVETARCT

SEQ ID NO: 452 - protein, 41 aa, synthetic construct
MGSNTKSLDNNYSTPNERGDHNKTLDRSGDLGDMEPLKGTT

SEQ ID NO: 453 - protein, 41 aa, synthetic construct
MLDNNYSTPNERGDHNKTLDRSGDLGDMEPLKGTTPLMQKI

SEQ ID NO: 454 - protein, 41 aa, synthetic construct
MDGLGELKKLLETHIHNQGLAAIEKCGEAALNDPKMYVQTV

SEQ ID NO: 455 - protein, 41 aa, synthetic construct
MKKLLETHIHNQGLAAIEKCGEAALNDPKMYVQTVLDVHKK

SEQ ID NO: 456 - protein, 41 aa, synthetic construct
MHIHNQGLAAIEKCGEAALNDPKMYVQTVLDVHKKYNALVM

SEQ ID NO: 457 - protein, 41 aa, synthetic construct
MKKGVKGLTEQEVETILDKAMVLFRFMQEKDVFERYYKQHL

SEQ ID NO: 458 - protein, 41 aa, synthetic construct
MLTEQEVETILDKAMVLFRFMQEKDVFERYYKQHLARRLLT

SEQ ID NO: 459 - protein, 41 aa, synthetic construct
METILDKAMVLFRFMQEKDVFERYYKQHLARRLLTNKSVSD

SEQ ID NO: 460 - protein, 41 aa, synthetic construct
MAMVLFRFMQEKDVFERYYKQHLARRLLTNKSVSDDSEKNM

SEQ ID NO: 461 - protein, 41 aa, synthetic construct
MLKFLEETNCLYAAEGQRLMQEREVPEYLNHVSKRLEEEGD

SEQ ID NO: 462 - protein, 41 aa, synthetic construct
MTNCLYAAEGQRLMQEREVPEYLNHVSKRLEEEGDRVITYL

SEQ ID NO: 463 - protein, 41 aa, synthetic construct
MAEGQRLMQEREVPEYLNHVSKRLEEEGDRVITYLDHSTQK

SEQ ID NO: 464 - protein, 41 aa, synthetic construct
MPEYLNHVSKRLEEEGDRVITYLDHSTQKPLIACVEKQLLG

SEQ ID NO: 465 - protein, 41 aa, synthetic construct
MKGLDHLLDENRVPDLAQMYQLFSRVRGGQQALLQHWSEYI

SEQ ID NO: 466 - protein, 41 aa, synthetic construct
MLDENRVPDLAQMYQLFSRVRGGQQALLQHWSEYIKTFGTA

SEQ ID NO: 467 - protein, 41 aa, synthetic construct
MRTLDKIMILFRFIHGKDVFEAFYKKDLAKRLLVGKSASVD

SEQ ID NO: 468 - protein, 41 aa, synthetic construct
MMILFRFIHGKDVFEAFYKKDLAKRLLVGKSASVDAEKSML

SEQ ID NO: 469 - protein, 41 aa, synthetic construct
MIHGKDVFEAFYKKDLAKRLLVGKSASVDAEKSMLSKLKHE

SEQ ID NO: 470 - protein, 41 aa, synthetic construct
MKDLAKRLLVGKSASVDAEKSMLSKLKHECGAAFTSKLEGM

SEQ ID NO: 471 - protein, 41 aa, synthetic construct
MMSSGLWSQEKVTSPYWEERIFYLLLQECSVTDKQTQKLLK

SEQ ID NO: 472 - protein, 41 aa, synthetic construct
MSQEKVTSPYWEERIFYLLLQECSVTDKQTQKLLKVPKGSI

SEQ ID NO: 473 - protein, 41 aa, synthetic construct
MDVLPGKESLGYFVGVDMDNPIGNWDGRFDGVQLCSFACVE

SEQ ID NO: 474 - protein, 41 aa, synthetic construct
MESLGYFVGVDMDNPIGNWDGRFDGVQLCSFACVESTILLH

SEQ ID NO: 475 - protein, 41 aa, synthetic construct
MVGVDMDNPIGNWDGRFDGVQLCSFACVESTILLHINDIIP

SEQ ID NO: 476 - protein, 41 aa, synthetic construct
MRNRSELFYTLNGSSVDSQPQSKSKNTWYIDEVAEDPAKSL

SEQ ID NO: 477 - protein, 41 aa, synthetic construct
MFYTLNGSSVDSQPQSKSKNTWYIDEVAEDPAKSLTEISTD

SEQ ID NO: 478 - protein, 41 aa, synthetic construct
MVVIKPVHSSILGQDYCFEVTTSSGSKCFSCRSAAERDKWM

SEQ ID NO: 479 - protein, 41 aa, synthetic construct
MQDYCFEVTTSSGSKCFSCRSAAERDKWMENLRRAVHPNKD

SEQ ID NO: 480 - protein, 41 aa, synthetic construct
MHNLPPLRTVTVHLYRETDKKKKKERNSYLGLVSLPAASVA

SEQ ID NO: 481 - protein, 41 aa, synthetic construct
MRTVTVHLYRETDKKKKKERNSYLGLVSLPAASVAGRQFVE

SEQ ID NO: 482 - protein, 41 aa, synthetic construct
MVDRCGDNEHLIFRENTLATKAIEEYLKLVGQKYLQDALGE

SEQ ID NO: 483 - protein, 41 aa, synthetic construct
MRENTLATKAIEEYLKLVGQKYLQDALGEFIKALYESDENC

SEQ ID NO: 484 - protein, 41 aa, synthetic construct
MTKAIEEYLKLVGQKYLQDALGEFIKALYESDENCEVDPSK

SEQ ID NO: 485 - protein, 41 aa, synthetic construct
MAVLQDKLRISTKKLEEYETLFKCQEETTQKLVLEYQARLE

SEQ ID NO: 486 - protein, 41 aa, synthetic construct
MLRISTKKLEEYETLFKCQEETTQKLVLEYQARLEEGEERL

SEQ ID NO: 487 - protein, 41 aa, synthetic construct
MSQYGEVVDCVIMKDKTTNQSRGFGFVKFKDPNCVGTVLAS

SEQ ID NO: 488 - protein, 41 aa, synthetic construct
MVDCVIMKDKTTNQSRGFGFVKFKDPNCVGTVLASRPHTLD

SEQ ID NO: 489 - protein, 41 aa, synthetic construct
MEMEMKNIEKPSGTDPAGRDSPIQSCQDLTPVSHSQSETQL

SEQ ID NO: 490 - protein, 41 aa, synthetic construct
MCQDLTPVSHSQSETQLGSKSTSHSGQDTEEAGSSMSTLER

SEQ ID NO: 491 - protein, 41 aa, synthetic construct
MAWLTEEEPEPAEVTSTSQSPHSPDSSQSSLAQEEEEEDQG

SEQ ID NO: 492 - protein, 41 aa, synthetic construct
MEPEPAEVTSTSQSPHSPDSSQSSLAQEEEEEDQGRTRKRK

SEQ ID NO: 493 - protein, 41 aa, synthetic construct
MAGKQRMKEKEQENERKVAQLAEENERLKQEIERLTREVEA

SEQ ID NO: 494 - protein, 41 aa, synthetic construct
MRGGNSRWCDKSDEDDWSKPLPPSERLEQELFSGGNTGINF

SEQ ID NO: 495 - protein, 41 aa, synthetic construct
MLENMAYEHHYKGSSRGRSKSSRFSGGFGARDYRQSSGASS

SEQ ID NO: 496 - protein, 41 aa, synthetic construct
MEHHYKGSSRGRSKSSRFSGGFGARDYRQSSGASSSSFSSS

SEQ ID NO: 497 - protein, 41 aa, synthetic construct
MVGQFSGFPFEKGSVQYKKKEEMLKKFRNAMLKSICEVLDL

SEQ ID NO: 498 - protein, 41 aa, synthetic construct
MFPFEKGSVQYKKKEEMLKKFRNAMLKSICEVLDLERSGVN

SEQ ID NO: 499 - protein, 41 aa, synthetic construct
MSVQYKKKEEMLKKFRNAMLKSICEVLDLERSGVNSELVKR

SEQ ID NO: 500 - protein, 41 aa, synthetic construct
MKEEMLKKFRNAMLKSICEVLDLERSGVNSELVKRILNFLM

SEQ ID NO: 501 - protein, 41 aa, synthetic construct
MIRFCEHKRLNMATLRMTWEAKVQLKEILINSGFPEDCLLT

SEQ ID NO: 502 - protein, 41 aa, synthetic construct
MKRLNMATLRMTWEAKVQLKEILINSGFPEDCLLTQVFTNT

SEQ ID NO: 503 - protein, 41 aa, synthetic construct
MTLRMTWEAKVQLKEILINSGFPEDCLLTQVFTNTGPDNNL

SEQ ID NO: 504 - protein, 41 aa, synthetic construct
MCLLTQVFTNTGPDNNLDVVISLLAFGVYPNVCYHKEKRKI

SEQ ID NO: 505 - protein, 41 aa, synthetic construct
MLDELEKLLDKKQQENIDKKNQYKLIQCLKAFMNNKFGLQR

SEQ ID NO: 506 - protein, 41 aa, synthetic construct
MLLDKKQQENIDKKNQYKLIQCLKAFMNNKFGLQRILGDER

SEQ ID NO: 507 - protein, 41 aa, synthetic construct
MQENIDKKNQYKLIQCLKAFMNNKFGLQRILGDERSLLLLA

SEQ ID NO: 508 - protein, 41 aa, synthetic construct
MKNQYKLIQCLKAFMNNKFGLQRILGDERSLLLLARAIDPK

SEQ ID NO: 509 - protein, 41 aa, synthetic construct
MGDERSLLLLARAIDPKQPNMMTEIVKILSAICIVGEENIL

SEQ ID NO: 510 - protein, 41 aa, synthetic construct
MIDPKQPNMMTEIVKILSAICIVGEENILDKLLGAITTAAE

SEQ ID NO: 511 - protein, 41 aa, synthetic construct
MNMMTEIVKILSAICIVGEENILDKLLGAITTAAERNNRER

SEQ ID NO: 512 - protein, 41 aa, synthetic construct
MLRSGLKTMLPDLKEKENDELDIQLKVFDENKEDDLTELSH

SEQ ID NO: 513 - protein, 41 aa, synthetic construct
MTMLPDLKEKENDELDIQLKVFDENKEDDLTELSHRLNDIR

SEQ ID NO: 514 - protein, 41 aa, synthetic construct
MKEKENDELDIQLKVFDENKEDDLTELSHRLNDIRAEMDDM

SEQ ID NO: 515 - protein, 41 aa, synthetic construct
MMDDMNEVYHLLYNMLKDTAAENYFLSILQHFLLIRNDYYI

SEQ ID NO: 516 - protein, 41 aa, synthetic construct
MVYHLLYNMLKDTAAENYFLSILQHFLLIRNDYYIRPQYYK

SEQ ID NO: 517 - protein, 41 aa, synthetic construct
MNMLKDTAAENYFLSILQHFLLIRNDYYIRPQYYKIIEECV

SEQ ID NO: 518 - protein, 41 aa, synthetic construct
MAAENYFLSILQHFLLIRNDYYIRPQYYKIIEECVSQIVLH

SEQ ID NO: 519 - protein, 41 aa, synthetic construct
MWTKERWNQEFTKHQVLIMTCYVALNVLKNGYLSLSDINLL

SEQ ID NO: 520 - protein, 41 aa, synthetic construct
MNQEFTKHQVLIMTCYVALNVLKNGYLSLSDINLLVFDECH

SEQ ID NO: 521 - protein, 41 aa, synthetic construct
MNVLKNGYLSLSDINLLVFDECHLAILDHPYREIMKLCENC

SEQ ID NO: 522 - protein, 41 aa, synthetic construct
MSEDDDEDEEIEEKEKPETNFPSPFTNILCGIIFVERRYTA

SEQ ID NO: 523 - protein, 41 aa, synthetic construct
MDEEIEEKEKPETNFPSPFTNILCGIIFVERRYTAVVLNRL

SEQ ID NO: 524 - protein, 41 aa, synthetic construct
MKEKPETNFPSPFTNILCGIIFVERRYTAVVLNRLIKEAGK

SEQ ID NO: 525 - protein, 41 aa, synthetic construct
MSSNFITGHGIGKNQPRNKQMEAEFRKQEEVLRKFRAHETN

SEQ ID NO: 526 - protein, 41 aa, synthetic construct
MIATSIVEEGVDIPKCNLVVRFDLPTEYRSYVQSKGRARAP

SEQ ID NO: 527 - protein, 41 aa, synthetic construct
MEEGVDIPKCNLVVRFDLPTEYRSYVQSKGRARAPISNYIM

SEQ ID NO: 528 - protein, 41 aa, synthetic construct
MPKCNLVVRFDLPTEYRSYVQSKGRARAPISNYIMLADTDK

SEQ ID NO: 529 - protein, 41 aa, synthetic construct
MIQNLYSYENQPQPSDECTLLSNKYLDGNANKSTSDGSPVM

SEQ ID NO: 530 - protein, 41 aa, synthetic construct
MYENQPQPSDECTLLSNKYLDGNANKSTSDGSPVMAVMPGT

SEQ ID NO: 531 - protein, 41 aa, synthetic construct
MGFNLERLEMLGDSFLKHAITTYLFCTYPDAHEGRLSYMRS

SEQ ID NO: 532 - protein, 41 aa, synthetic construct
MLEMLGDSFLKHAITTYLFCTYPDAHEGRLSYMRSKKVSNC

SEQ ID NO: 533 - protein, 41 aa, synthetic construct
MITTYLFCTYPDAHEGRLSYMRSKKVSNCNLYRLGKKKGLP

SEQ ID NO: 534 - protein, 41 aa, synthetic construct
MHQNKSPPKVKAEDGMQCLQLKETLATQEPTDNQVRLRKRK

SEQ ID NO: 535 - protein, 41 aa, synthetic construct
MPKVKAEDGMQCLQLKETLATQEPTDNQVRLRKRKEIREDR

SEQ ID NO: 536 - protein, 41 aa, synthetic construct
MGFPQYAQLYEDFLFPIDISLVKREHDFLDRDAIEALCRRL

SEQ ID NO: 537 - protein, 41 aa, synthetic construct
MQLYEDFLFPIDISLVKREHDFLDRDAIEALCRRLNTLNKC

SEQ ID NO: 538 - protein, 41 aa, synthetic construct
MCALLLTSVDHDRAPVVGVRVNVLLSRYLIEPCGPGKSKLT

SEQ ID NO: 539 - protein, 41 aa, synthetic construct
MSVDHDRAPVVGVRVNVLLSRYLIEPCGPGKSKLTYMCRVD

SEQ ID NO: 540 - protein, 41 aa, synthetic construct
  VARIANT 19: note = X can be any amino acid
  VARIANT 38: note = X can be any amino acid
MRFAQRSVNVCLLLAEWQXMSKVDSVSGTLRHLQEGDXCIR

SEQ ID NO: 541 - protein, 41 aa, synthetic construct
  VARIANT 13: note = X can be any amino acid
  VARIANT 32: note = X can be any amino acid
MVNVCLLLAEWQXMSKVDSVSGTLRHLQEGDXCIRFSLTWN

SEQ ID NO: 542 - protein, 41 aa, synthetic construct
  VARIANT 26: note = X can be any amino acid
MLPLNPPRKGAQHPCPFMGIFFRSYXAYSFSTNLFCTLIVI

SEQ ID NO: 543 - protein, 41 aa, synthetic construct
  VARIANT 20: note = X can be any amino acid
MRKGAQHPCPFMGIFFRSYXAYSFSTNLFCTLIVIGWLLHP

SEQ ID NO: 544 - protein, 41 aa, synthetic construct
  VARIANT 14: note = X can be any amino acid
MPCPFMGIFFRSYXAYSFSTNLFCTLIVIGWLLHPFQMQFI

SEQ ID NO: 545 - protein, 41 aa, synthetic construct
  VARIANT 8: note = X can be any amino acid
MIFFRSYXAYSFSTNLFCTLIVIGWLLHPFQMQFIFRPDCK

SEQ ID NO: 546 - protein, 41 aa, synthetic construct
  VARIANT 14: note = X can be any amino acid
  VARIANT 37: note = X can be any amino acid
MRDIKTEHDNTYSXIKHQHFFPVRILCIFVFVTETPXDTMF

SEQ ID NO: 547 - protein, 41 aa, synthetic construct
  VARIANT 8: note = X can be any amino acid
  VARIANT 31: note = X can be any amino acid
MHDNTYSXIKHQHFFPVRILCIFVFVTETPXDTMFGNIGNY

SEQ ID NO: 548 - protein, 41 aa, synthetic construct
  VARIANT 2: note = X can be any amino acid
  VARIANT 25: note = X can be any amino acid
MXIKHQHFFPVRILCIFVFVTETPXDTMFGNIGNYVCPKEI

SEQ ID NO: 549 - protein, 41 aa, synthetic construct
  VARIANT 19: note = X can be any amino acid
MFFPVRILCIFVFVTETPXDTMFGNIGNYVCPKEIPVNLTH

SEQ ID NO: 550 - protein, 41 aa, synthetic construct
  VARIANT 13: note = X can be any amino acid
MLCIFVFVTETPXDTMFGNIGNYVCPKEIPVNLTHLQKAFS

SEQ ID NO: 551 - protein, 41 aa, synthetic construct
  VARIANT 36: note = X can be any amino acid
MNLTHLQKAFSPPLVVNGIPESHMCLFIGLVLISKXVFWFY

SEQ ID NO: 552 - protein, 41 aa, synthetic construct
  VARIANT 30: note = X can be any amino acid
MKAFSPPLVVNGIPESHMCLFIGLVLISKXVFWFYDFLSYF

SEQ ID NO: 553 - protein, 41 aa, synthetic construct
  VARIANT 24: note = X can be any amino acid
MLVVNGIPESHMCLFIGLVLISKXVFWFYDFLSYFIFPTFL

SEQ ID NO: 554 - protein, 41 aa, synthetic construct
  VARIANT 33: note = X can be any amino acid
  VARIANT 35: note = X can be any amino acid
MNHSKTQQEENQPKPVKFFRTFRRVVFIQVLLXWXGLTQET

SEQ ID NO: 555 - protein, 41 aa, synthetic construct
  VARIANT 27: note = X can be any amino acid
  VARIANT 29: note = X can be any amino acid
MQEENQPKPVKFFRTFRRVVFIQVLLXWXGLTQETVLVNLL

SEQ ID NO: 556 - protein, 40 aa, synthetic construct
  VARIANT 21: note = X can be any amino acid
  VARIANT 23: note = X can be any amino acid
MKPVKFFRTFRRVVFIQVLLXWXGLTQETVLVNLLCMDQK

SEQ ID NO: 557 - protein, 41 aa, synthetic construct
  VARIANT 15: note = X can be any amino acid
  VARIANT 17: note = X can be any amino acid
  VARIANT 35: note = X can be any amino acid
  VARIANT 40: note = X can be any amino acid
MRTFRRVVFIQVLLXWXGLTQETVLVNLLCMDQKXIMYEXE

SEQ ID NO: 558 - protein, 41 aa, synthetic construct
  VARIANT 9: note = X can be any amino acid
  VARIANT 11: note = X can be any amino acid
  VARIANT 29: note = X can be any amino acid
  VARIANT 34: note = X can be any amino acid
  VARIANT 37: note = X can be any amino acid
MVFIQVLLXWXGLTQETVLVNLLCMDQKXIMYEXELXEGFL

SEQ ID NO: 559 - protein, 41 aa, synthetic construct
  VARIANT 3: note = X can be any amino acid
  VARIANT 5: note = X can be any amino acid
  VARIANT 23: note = X can be any amino acid
  VARIANT 28: note = X can be any amino acid
  VARIANT 31: note = X can be any amino acid
MLXWXGLTQETVLVNLLCMDQKXIMYEXELXEGFLFCYNLV

SEQ ID NO: 560 - protein, 41 aa, synthetic construct
  VARIANT 11: note = X can be any amino acid
  VARIANT 16: note = X can be any amino acid
  VARIANT 19: note = X can be any amino acid
  VARIANT 40: note = X can be any amino acid
MVNLLCMDQKXIMYEXELXEGFLFCYNLVTIFSVISKVLXR

SEQ ID NO: 561 - protein, 41 aa, synthetic construct
  VARIANT 5: note = X can be any amino acid
  VARIANT 10: note = X can be any amino acid
  VARIANT 13: note = X can be any amino acid
  VARIANT 34: note = X can be any amino acid
MDQKXIMYEXELXEGFLFCYNLVTIFSVISKVLXRILGQGI

SEQ ID NO: 562 - protein, 41 aa, synthetic construct
  VARIANT 4: note = X can be any amino acid
  VARIANT 7: note = X can be any amino acid
  VARIANT 28: note = X can be any amino acid
  VARIANT 40: note = X can be any amino acid
MYEXELXEGFLFCYNLVTIFSVISKVLXRILGQGIRLEFXN

SEQ ID NO: 563 - protein, 41 aa, synthetic construct
  VARIANT 22: note = X can be any amino acid
  VARIANT 34: note = X can be any amino acid
MEGFLFCYNLVTIFSVISKVLXRILGQGIRLEFXNLSILDI

SEQ ID NO: 564 - protein, 41 aa, synthetic construct
  VARIANT 32: note = X can be any amino acid
MRYSFGFCTSRLFSSYCKYTLREYSLSEENKXKEEVYNLLY

SEQ ID NO: 565 - protein, 41 aa, synthetic construct
  VARIANT 26: note = X can be any amino acid
MCTSRLFSSYCKYTLREYSLSEENKXKEEVYNLLYICTDYN

SEQ ID NO: 566 - protein, 41 aa, synthetic construct
  VARIANT 20: note = X can be any amino acid
  VARIANT 37: note = X can be any amino acid
MSSYCKYTLREYSLSEENKXKEEVYNLLYICTDYNQXVHYY

SEQ ID NO: 567 - protein, 41 aa, synthetic construct
  VARIANT 14: note = X can be any amino acid
  VARIANT 31: note = X can be any amino acid
  VARIANT 36: note = X can be any amino acid
MTLREYSLSEENKXKEEVYNLLYICTDYNQXVHYYXMFKVR

SEQ ID NO: 568 - protein, 41 aa, synthetic construct
MAEGSPISLESTLESTVAEGSLIPSESTLESTVAEGSDSGL

SEQ ID NO: 569 - protein, 41 aa, synthetic construct
MSLESTLESTVAEGSLIPSESTLESTVAEGSDSGLALRLVN

SEQ ID NO: 570 - protein, 41 aa, synthetic construct
MESTVAEGSLIPSESTLESTVAEGSDSGLALRLVNGDGRCQ

SEQ ID NO: 571 - protein, 41 aa, synthetic construct
MDLVISTWNGYYECRPQITPNLVIFTIPYSGCGTFKQADND

SEQ ID NO: 572 - protein, 41 aa, synthetic construct
MWNGYYECRPQITPNLVIFTIPYSGCGTFKQADNDTIDYSN

SEQ ID NO: 573 - protein, 41 aa, synthetic construct
MAAVAERVGTRSEKQCRSKWLNYLNWKQSGGTEWTKEDEIN

SEQ ID NO: 574 - protein, 41 aa, synthetic construct
MKQCRSKWLNYLNWKQSGGTEWTKEDEINLILRIAELDVAD

SEQ ID NO: 575 - protein, 41 aa, synthetic construct
MAAETLPEASRAVENGCCTPKEGRGAPAEAGKEQKETNIES

SEQ ID NO: 576 - protein, 41 aa, synthetic construct
MEASRAVENGCCTPKEGRGAPAEAGKEQKETNIESMKMEGS

SEQ ID NO: 577 - protein, 41 aa, synthetic construct
MHQATYNKQPMYRKAIYEVLQVASSRAGKLFPVCHDSDESD

SEQ ID NO: 578 - protein, 41 aa, synthetic construct
MKAIYEVLQVASSRAGKLFPVCHDSDESDTAKAVEVQNKPM

SEQ ID NO: 579 - protein, 41 aa, synthetic construct
MLQVASSRAGKLFPVCHDSDESDTAKAVEVQNKPMIEWALG

SEQ ID NO: 580 - protein, 41 aa, synthetic construct
MAAAYAPPPPAKKPRKSTAEKPKVKEIIDERTRERLVYEVR

SEQ ID NO: 581 - protein, 41 aa, synthetic construct
MPRKSTAEKPKVKEIIDERTRERLVYEVRQKCRNIEDICIS

SEQ ID NO: 582 - protein, 41 aa, synthetic construct
MCSNLGEELEVIFSLFDSKENRPISERFFLRLNRNGLPKAP

SEQ ID NO: 583 - protein, 41 aa, synthetic construct
MELEVIFSLFDSKENRPISERFFLRLNRNGLPKAPDKPERH

SEQ ID NO: 584 - protein, 41 aa, synthetic construct
MDIEQIRREYSSVFSHGVSITRKLGFSNIIMPGEMRNDLYI

SEQ ID NO: 585 - protein, 41 aa, synthetic construct
MREYSSVFSHGVSITRKLGFSNIIMPGEMRNDLYITIERGE

SEQ ID NO: 586 - protein, 41 aa, synthetic construct
MFSHGVSITRKLGFSNIIMPGEMRNDLYITIERGEFEKGGK

SEQ ID NO: 587 - protein, 41 aa, synthetic construct
MITRKLGFSNIIMPGEMRNDLYITIERGEFEKGGKSVARNV

SEQ ID NO: 588 - protein, 41 aa, synthetic construct
MVKFLQDTLDTLFGILDENSQKYGSKVFDSLVHIINLLQDS

SEQ ID NO: 589 - protein, 41 aa, synthetic construct
MTLDTLFGILDENSQKYGSKVFDSLVHIINLLQDSKFHHFK

SEQ ID NO: 590 - protein, 41 aa, synthetic construct
MGILDENSQKYGSKVFDSLVHIINLLQDSKFHHFKPVMDTY

SEQ ID NO: 591 - protein, 41 aa, synthetic construct
MDRPLREFLTYPMQTEWQRKEHLHLTIIQNFDRGKCWENGI

SEQ ID NO: 592 - protein, 41 aa, synthetic construct
MQTEWQRKEHLHLTIIQNFDRGKCWENGIILCRKIAEQYES

SEQ ID NO: 593 - protein, 41 aa, synthetic construct
MQREGVPDNIKSFYKVNHIWKFRYDRPFHKGTKDKENEFKS

SEQ ID NO: 594 - protein, 41 aa, synthetic construct
MDNIKSFYKVNHIWKFRYDRPFHKGTKDKENEFKSLWVERT

SEQ ID NO: 595 - protein, 41 aa, synthetic construct
MTKDKENEFKSLWVERTSLYLVQSLPGISRWFEVEKREVVE

SEQ ID NO: 596 - protein, 41 aa, synthetic construct
MEFKSLWVERTSLYLVQSLPGISRWFEVEKREVVEMSPLEN

SEQ ID NO: 597 - protein, 41 aa, synthetic construct
MEDKDDSVVLPLGADTLTHNLGIPVLVVCTKCDAISVLEKE

SEQ ID NO: 598 - protein, 41 aa, synthetic construct
MADTLTHNLGIPVLVVCTKCDAISVLEKEHDYRDEHFDFIQ

SEQ ID NO: 599 - protein, 41 aa, synthetic construct
MIYTSVKENKNIDLVYKYIVQKLYGFPYKIPAVVVEKDAVF

SEQ ID NO: 600 - protein, 41 aa, synthetic construct
MENKNIDLVYKYIVQKLYGFPYKIPAVVVEKDAVFIPAGWD

SEQ ID NO: 601 - protein, 41 aa, synthetic construct
MLVYKYIVQKLYGFPYKIPAVVVEKDAVFIPAGWDNDKKIG

SEQ ID NO: 602 - protein, 41 aa, synthetic construct
MVQKLYGFPYKIPAVVVEKDAVFIPAGWDNDKKIGILHENF

SEQ ID NO: 603 - protein, 41 aa, synthetic construct
MFPYKIPAVVVEKDAVFIPAGWDNDKKIGILHENFQTLKAE

SEQ ID NO: 604 - protein, 41 aa, synthetic construct
MAVVVEKDAVFIPAGWDNDKKIGILHENFQTLKAEDNFEDI

SEQ ID NO: 605 - protein, 41 aa, synthetic construct
MSPIPAGSKKIDPNMKAGATSEGVLANFFNSLLSKKTGSPG

SEQ ID NO: 606 - protein, 41 aa, synthetic construct
MSKKIDPNMKAGATSEGVLANFFNSLLSKKTGSPGGPGVSG

SEQ ID NO: 607 - protein, 41 aa, synthetic construct
MLAYTLGVKQLIVGVNKMDSTEPPYSQKRYEEIVKEVSTYI

SEQ ID NO: 608 - protein, 41 aa, synthetic construct
MVKQLIVGVNKMDSTEPPYSQKRYEEIVKEVSTYIKKIGYN

SEQ ID NO: 609 - protein, 41 aa, synthetic construct
MAMCFDGVKRLCHIRGKLRKKVWINTSDIILVGLRDYQDNK

SEQ ID NO: 610 - protein, 41 aa, synthetic construct
MVKRLCHIRGKLRKKVWINTSDIILVGLRDYQDNKADVILK

SEQ ID NO: 611 - protein, 41 aa, synthetic construct
MQDNKADVILKYNADEARSLKAYGELPEHAKINETDTFGPG

SEQ ID NO: 612 - protein, 41 aa, synthetic construct
MVILKYNADEARSLKAYGELPEHAKINETDTFGPGDDDEIQ

SEQ ID NO: 613 - protein, 41 aa, synthetic construct
MALLQDRNTCPKYIKWTQREKGIFKLVDSKAVSKLWGKQKN

SEQ ID NO: 614 - protein, 41 aa, synthetic construct
MIKWTQREKGIFKLVDSKAVSKLWGKQKNKPDMNYETMGRA

SEQ ID NO: 615 - protein, 41 aa, synthetic construct
MQQYVSSHGEVHLDCLGSIQDKITVCATDDSYQKARQSMAQ

SEQ ID NO: 616 - protein, 41 aa, synthetic construct
MQDKITVCATDDSYQKARQSMAQAEEETRSRSAIVIKAGGR

SEQ ID NO: 617 - protein, 41 aa, synthetic construct
MEEVQRGSFYAFSYYYDRAVDTDMIDYEKGGILKVEDFERK

SEQ ID NO: 618 - protein, 41 aa, synthetic construct
MSFYAFSYYYDRAVDTDMIDYEKGGILKVEDFERKAREVCD

SEQ ID NO: 619 - protein, 41 aa, synthetic construct
MYYYDRAVDTDMIDYEKGGILKVEDFERKAREVCDNLENFT

SEQ ID NO: 620 - protein, 41 aa, synthetic construct
MMVKSPMTQAGLTSPNMGMGTSGPNQGPTQSTGMMNSPVNQ

SEQ ID NO: 621 - protein, 41 aa, synthetic construct
MPVNQPAMGMNTGMNAGMNPGMLAAGNGQGIMPNQVMNGSI

SEQ ID NO: 622 - protein, 41 aa, synthetic construct
MPNLSTVSQIDPSSIERAYAALGLPYQVNQMPTQPQVQAKN

SEQ ID NO: 623 - protein, 41 aa, synthetic construct
MSIERAYAALGLPYQVNQMPTQPQVQAKNQQNQQPGQSPQG

SEQ ID NO: 624 - protein, 41 aa, synthetic construct
MAALGLPYQVNQMPTQPQVQAKNQQNQQPGQSPQGMRPMSN

SEQ ID NO: 625 - protein, 41 aa, synthetic construct
MLGPMPTAAQPSTTGIRKQWHEDITQDLRNHLVHKLVQAIF

SEQ ID NO: 626 - protein, 41 aa, synthetic construct
MQDLRNHLVHKLVQAIFPTPDPAALKDRRMENLVAYARKVE

SEQ ID NO: 627 - protein, 41 aa, synthetic construct
MQAIFPTPDPAALKDRRMENLVAYARKVEGDMYESANNRAE

SEQ ID NO: 628 - protein, 41 aa, synthetic construct
MELEEKRRTRLQKQNMLPNAAGMVPVSMNPGPNMGQPQPGM

SEQ ID NO: 629 - protein, 41 aa, synthetic construct
MRTRLQKQNMLPNAAGMVPVSMNPGPNMGQPQPGMTSNGPL

SEQ ID NO: 630 - protein, 41 aa, synthetic construct
MVSMNPGPNMGQPQPGMTSNGPLPDPSMIRGSVPNQMMPRI

SEQ ID NO: 631 - protein, 41 aa, synthetic construct
MCYGKQLCTIPRDATYYSYQNRYHFCEKCFNEIQGESVSLG

SEQ ID NO: 632 - protein, 41 aa, synthetic construct
MATYYSYQNRYHFCEKCFNEIQGESVSLGDDPSQPQTTINK

SEQ ID NO: 633 - protein, 41 aa, synthetic construct
MQNRYHFCEKCFNEIQGESVSLGDDPSQPQTTINKEQFSKR

SEQ ID NO: 634 - protein, 41 aa, synthetic construct
MCEKCFNEIQGESVSLGDDPSQPQTTINKEQFSKRKNDTLD

SEQ ID NO: 635 - protein, 41 aa, synthetic construct
MSVAQHGQPLNMAPQPGLGQVGISPLKPGTVSQQALQNLLR

SEQ ID NO: 636 - protein, 41 aa, synthetic construct
MPQPGLGQVGISPLKPGTVSQQALQNLLRTLRSPSSPLQQQ

SEQ ID NO: 637 - protein, 41 aa, synthetic construct
MIGYHPEELLGRSAYEFYHALDSENMTKSHQNLCTKGQVVS

SEQ ID NO: 638 - protein, 41 aa, synthetic construct
MAYEFYHALDSENMTKSHQNLCTKGQVVSGQYRMLAKHGGY

SEQ ID NO: 639 - protein, 41 aa, synthetic construct
MMTPAEAEMHFLENAKKLSMYGVDLHHAKDSEGVEIMLGVC

SEQ ID NO: 640 - protein, 41 aa, synthetic construct
MEMHFLENAKKLSMYGVDLHHAKDSEGVEIMLGVCASGLLI

SEQ ID NO: 641 - protein, 41 aa, synthetic construct
MIKIRPGEFEQFESTIGFKLPNHRAAKRLWKVCVEHHTFFR

SEQ ID NO: 642 - protein, 41 aa, synthetic construct
MSTIGFKLPNHRAAKRLWKVCVEHHTFFRLLLPEAPPKKFL

SEQ ID NO: 643 - protein, 41 aa, synthetic construct
MSEGVPFRTVSEWLESIKMQQYTEHFMAAGYTAIEKVVQMT

SEQ ID NO: 644 - protein, 41 aa, synthetic construct
MTAIEKVVQMTNDDIKRIGVRLPGHQKRIAYSLLGLKDQVN

SEQ ID NO: 645 - protein, 41 aa, synthetic construct
MQFTKIDTIAADESFTQMDLGDRILKLNTEIREVGPVNKKG

SEQ ID NO: 646 - protein, 41 aa, synthetic construct
MLGDRILKLNTEIREVGPVNKKGFYLAFQDVGACVALVSVR

SEQ ID NO: 647 - protein, 41 aa, synthetic construct
MKLNTEIREVGPVNKKGFYLAFQDVGACVALVSVRVYFKKC

SEQ ID NO: 648 - protein, 41 aa, synthetic construct
MREVGPVNKKGFYLAFQDVGACVALVSVRVYFKKCPFTVKN

SEQ ID NO: 649 - protein, 41 aa, synthetic construct
MQTVHEFAKELDATNISIDKVVGAGEFGEVCSGRLKLPSKK

SEQ ID NO: 650 - protein, 41 aa, synthetic construct
MAKELDATNISIDKVVGAGEFGEVCSGRLKLPSKKEISVAI

SEQ ID NO: 651 - protein, 41 aa, synthetic construct
MTNISIDKVVGAGEFGEVCSGRLKLPSKKEISVAIKTLKVG

SEQ ID NO: 652 - protein, 41 aa, synthetic construct
MFRTTGDWLNGVWTAHCKEIFTGVEYSSCDTIAKISTDDMK

SEQ ID NO: 653 - protein, 41 aa, synthetic construct
MWLNGVWTAHCKEIFTGVEYSSCDTIAKISTDDMKKVGVTV

SEQ ID NO: 654 - protein, 41 aa, synthetic construct
MTAHCKEIFTGVEYSSCDTIAKISTDDMKKVGVTVVGPQKK

SEQ ID NO: 655 - protein, 41 aa, synthetic construct
MSSGNPVYEKYYRQVDTGNTGRVLASDAAAFLKKSGLPDLI

SEQ ID NO: 656 - protein, 41 aa, synthetic construct
MTGRVLASDAAAFLKKSGLPDLILGKIWDLADTDGKGILNK

SEQ ID NO: 657 - protein, 41 aa, synthetic construct
MSDAAAFLKKSGLPDLILGKIWDLADTDGKGILNKQEFFVA

SEQ ID NO: 658 - protein, 41 aa, synthetic construct
MEDGTQRCEKCSKPCARVCYGLGMEHLREVRAVTSANIQEF

SEQ ID NO: 659 - protein, 41 aa, synthetic construct
MCEKCSKPCARVCYGLGMEHLREVRAVTSANIQEFAGCKKI

SEQ ID NO: 660 - protein, 41 aa, synthetic construct
MNGSSGCGRCHKSCTGRCWGPTENHCQTLTRTVCAEQCDGR

SEQ ID NO: 661 - protein, 41 aa, synthetic construct
MCQTLTRTVCAEQCDGRCYGPYVSDCCHRECAGGCSGPKDT

SEQ ID NO: 662 - protein, 41 aa, synthetic construct
MEGMVCNHLCSSDGCWGPGPDQCLSCRRFSRGRICIESCNL

SEQ ID NO: 663 - protein, 41 aa, synthetic construct
MGCWGPGPDQCLSCRRFSRGRICIESCNLYDGEFREFENGS

SEQ ID NO: 664 - protein, 41 aa, synthetic construct
MPDQCLSCRRFSRGRICIESCNLYDGEFREFENGSICVECD

SEQ ID NO: 665 - protein, 41 aa, synthetic construct
MMSIAGVAAQEIRVPLKTGFLHNGRAMGNMRKTYWSSRSEF

SEQ ID NO: 666 - protein, 41 aa, synthetic construct
MAAQEIRVPLKTGFLHNGRAMGNMRKTYWSSRSEFKNNFLN

SEQ ID NO: 667 - protein, 41 aa, synthetic construct
MDPKYVSSKALQRQNSEGSASKVPCILPIIENGKKVSSTHY

SEQ ID NO: 668 - protein, 41 aa, synthetic construct
MASKVPCILPIIENGKKVSSTHYYLLPERPPYLDKYEKFFR

SEQ ID NO: 669 - protein, 41 aa, synthetic construct
MILPIIENGKKVSSTHYYLLPERPPYLDKYEKFFREAEETN

SEQ ID NO: 670 - protein, 41 aa, synthetic construct
MNGKKVSSTHYYLLPERPPYLDKYEKFFREAEETNGGAQIQ

SEQ ID NO: 671 - protein, 41 aa, synthetic construct
MSTHYYLLPERPPYLDKYEKFFREAEETNGGAQIQPLPADC

SEQ ID NO: 672 - protein, 41 aa, synthetic construct
MLPERPPYLDKYEKFFREAEETNGGAQIQPLPADCGISSAT

SEQ ID NO: 673 - protein, 41 aa, synthetic construct
MSCVTSCTKEPETSNKYIDAFTTSDFEDDWENLLGSEPFAM

SEQ ID NO: 674 - protein, 41 aa, synthetic construct
MTKEPETSNKYIDAFTTSDFEDDWENLLGSEPFAMQNIDMP

SEQ ID NO: 675 - protein, 41 aa, synthetic construct
MPNQTSASKVGSFFDDWNDPSFANEIIKACHQLDNTWEADD

SEQ ID NO: 676 - protein, 41 aa, synthetic construct
MSKVGSFFDDWNDPSFANEIIKACHQLDNTWEADDVDDDLL

SEQ ID NO: 677 - protein, 41 aa, synthetic construct
MFDDWNDPSFANEIIKACHQLDNTWEADDVDDDLLYQACDD

SEQ ID NO: 678 - protein, 41 aa, synthetic construct
MPSFANEIIKACHQLDNTWEADDVDDDLLYQACDDIERLTQ

SEQ ID NO: 679 - protein, 41 aa, synthetic construct
MNLNTTVGFSKFTFTRMKNSQILSQFNQNCITGSMSDTKIT

SEQ ID NO: 680 - protein, 41 aa, synthetic construct
MGFSKFTFTRMKNSQILSQFNQNCITGSMSDTKITQGVEKK

SEQ ID NO: 681 - protein, 41 aa, synthetic construct
MFTRMKNSQILSQFNQNCITGSMSDTKITQGVEKKKGVNPL

SEQ ID NO: 682 - protein, 41 aa, synthetic construct
MSQILSQFNQNCITGSMSDTKITQGVEKKKGVNPLLEEAVG

SEQ ID NO: 683 - protein, 41 aa, synthetic construct
MPCSKAVMSQALKATFSGFKKEQRRLGIPKNPWLWSEQQVC

SEQ ID NO: 684 - protein, 41 aa, synthetic construct
MLGIPKNPWLWSEQQVCQWLLWATNEFSLVNVNLQRFGMNG

SEQ ID NO: 685 - protein, 41 aa, synthetic construct
MVNLQRFGMNGQMLCNLGKERFLELAPDFVGDILWEHLEQM

SEQ ID NO: 686 - protein, 41 aa, synthetic construct
MAENEFSLRPIDSNTFEMNGKALLLLTKEDFRYRSPHSGDV

SEQ ID NO: 687 - protein, 41 aa, synthetic construct
MNTFEMNGKALLLLTKEDFRYRSPHSGDVLYELLQHILKQR

SEQ ID NO: 688 - protein, 41 aa, synthetic construct
MENFIRWEDKESKIFRIVDPNGLARLWGNHKNRTNMTYEKM

SEQ ID NO: 689 - protein, 41 aa, synthetic construct
MEDKESKIFRIVDPNGLARLWGNHKNRTNMTYEKMSRALRH

SEQ ID NO: 690 - protein, 41 aa, synthetic construct
MYLHLAFLMTTVFSLSPGTKANYTRLWANSTSSWDSVIQNK

SEQ ID NO: 691 - protein, 41 aa, synthetic construct
MLMTTVFSLSPGTKANYTRLWANSTSSWDSVIQNKTGRNQN

SEQ ID NO: 692 - protein, 41 aa, synthetic construct
MSSWDSVIQNKTGRNQNENINTNPITPEVDYKGNSTNMPET

SEQ ID NO: 693 - protein, 41 aa, synthetic construct
MIQNKTGRNQNENINTNPITPEVDYKGNSTNMPETSHIVAL

SEQ ID NO: 694 - protein, 41 aa, synthetic construct
MRNQNENINTNPITPEVDYKGNSTNMPETSHIVALTSKSEQ

SEQ ID NO: 695 - protein, 41 aa, synthetic construct
MASGLWPAESDTWKRTKQLTGPNLVMQSTGVLTATRERKDE

SEQ ID NO: 696 - protein, 41 aa, synthetic construct
MAESDTWKRTKQLTGPNLVMQSTGVLTATRERKDEEGTEKL

SEQ ID NO: 697 - protein, 41 aa, synthetic construct
MKRTKQLTGPNLVMQSTGVLTATRERKDEEGTEKLTNKQIG

SEQ ID NO: 698 - protein, 41 aa, synthetic construct
MQTPQKNNYNSIAAILIGVLLTSMLVAIIIIVLWKCLRKPV

SEQ ID NO: 699 - protein, 41 aa, synthetic construct
MNYNSIAAILIGVLLTSMLVAIIIIVLWKCLRKPVLNDQNW

SEQ ID NO: 700 - protein, 41 aa, synthetic construct
MDEDSDNSAIYVQGLNDSVTLDDLADFFKQCGVVKMNKRTG

SEQ ID NO: 701 - protein, 41 aa, synthetic construct
MTLDDLADFFKQCGVVKMNKRTGQPMIHIYLDKETGKPKGD

SEQ ID NO: 702 - protein, 41 aa, synthetic construct
MGVVKMNKRTGQPMIHIYLDKETGKPKGDATVSYEDPPTAK

SEQ ID NO: 703 - protein, 41 aa, synthetic construct
MKRTGQPMIHIYLDKETGKPKGDATVSYEDPPTAKAAVEWF

SEQ ID NO: 704 - protein, 41 aa, synthetic construct
MDKETGKPKGDATVSYEDPPTAKAAVEWFDGKDFQGSKLKV

SEQ ID NO: 705 - protein, 41 aa, synthetic construct
MSTTEVDFAFTVWQSFPERIVGYPARSHFWDNSKERWGYTS

SEQ ID NO: 706 - protein, 41 aa, synthetic construct
MFAFTVWQSFPERIVGYPARSHFWDNSKERWGYTSKWTNDY

SEQ ID NO: 707 - protein, 41 aa, synthetic construct
MIIMLTSDELQFGYEVWREFPDRLVGYPGRLHLWDHEMNKW

SEQ ID NO: 708 - protein, 41 aa, synthetic construct
MDELQFGYEVWREFPDRLVGYPGRLHLWDHEMNKWKYESEW

SEQ ID NO: 709 - protein, 41 aa, synthetic construct
MFRVLIGTYYDNFCAIARLIGTKTCRQVYEFRVKESSIIAP

SEQ ID NO: 710 - protein, 41 aa, synthetic construct
MIGTKTCRQVYEFRVKESSIIAPAPAEDVDTPPRKKKRKHR

SEQ ID NO: 711 - protein, 41 aa, synthetic construct
MVVDATRKGNKIRFANHSVNPNCYAKVMMVNGDHRIGIFAK

SEQ ID NO: 712 - protein, 41 aa, synthetic construct
MKGNKIRFANHSVNPNCYAKVMMVNGDHRIGIFAKRAIQTG

SEQ ID NO: 713 - protein, 41 aa, synthetic construct
MNRLPPEFSPVIIKEWAAYKGKSPQTPELVEALAFREWTCP

SEQ ID NO: 714 - protein, 41 aa, synthetic construct
MKGKSPQTPELVEALAFREWTCPNLKRLWLGKAVEDKNRRM

SEQ ID NO: 715 - protein, 41 aa, synthetic construct
MLASVSSQRNLFGRQDKIHKLDSSYFKNRGIYTLNEHDKYN

SEQ ID NO: 716 - protein, 41 aa, synthetic construct
MQRNLFGRQDKIHKLDSSYFKNRGIYTLNEHDKYNIRSHGY

SEQ ID NO: 717 - protein, 41 aa, synthetic construct
MRQDKIHKLDSSYFKNRGIYTLNEHDKYNIRSHGYKPHFVP

SEQ ID NO: 718 - protein, 41 aa, synthetic construct
MKLDSSYFKNRGIYTLNEHDKYNIRSHGYKPHFVPNFNGPN

SEQ ID NO: 719 - protein, 41 aa, synthetic construct
MTITGNIYYARSGTKIIGKVHEKFTLIDGIRVATGSYSFTW

SEQ ID NO: 720 - protein, 41 aa, synthetic construct
MYYARSGTKIIGKVHEKFTLIDGIRVATGSYSFTWTDGKLN

SEQ ID NO: 721 - protein, 41 aa, synthetic construct
MTKIIGKVHEKFTLIDGIRVATGSYSFTWTDGKLNSSNLVI

SEQ ID NO: 722 - protein, 41 aa, synthetic construct
MLIDGIRVATGSYSFTWTDGKLNSSNLVILSGQVVEHFDLE

SEQ ID NO: 723 - protein, 41 aa, synthetic construct
MDRSKKYPLLIQVYGGPCSQSVRSVFAVNWISYLASKEGMV

SEQ ID NO: 724 - protein, 41 aa, synthetic construct
MPLLIQVYGGPCSQSVRSVFAVNWISYLASKEGMVIALVDG

SEQ ID NO: 725 - protein, 41 aa, synthetic construct
MYYASVYTERFMGLPTKDDNLEHYKNSTVMARAEYFRNVDY

SEQ ID NO: 726 - protein, 41 aa, synthetic construct
MTERFMGLPTKDDNLEHYKNSTVMARAEYFRNVDYLLIHGT

SEQ ID NO: 727 - protein, 41 aa, synthetic construct
MVAGDLLQQFRTVRSFPGSKEYKVKAIGGIDWDSHPFGYNL

SEQ ID NO: 728 - protein, 41 aa, synthetic construct
MQQFRTVRSFPGSKEYKVKAIGGIDWDSHPFGYNLTLQAKD

SEQ ID NO: 729 - protein, 41 aa, synthetic construct
MRSFPGSKEYKVKAIGGIDWDSHPFGYNLTLQAKDKGTPPQ

SEQ ID NO: 730 - protein, 41 aa, synthetic construct
MPVVMVKAIPAYSHLRYVFKSTPGKAKFSLNYNTGLISILE

SEQ ID NO: 731 - protein, 41 aa, synthetic construct
MAIPAYSHLRYVFKSTPGKAKFSLNYNTGLISILEPVKRQQ

SEQ ID NO: 732 - protein, 41 aa, synthetic construct
MTNHYWNETVRDPILWRYFLLRDLPSWSSVDWKSLPDLEIL

SEQ ID NO: 733 - protein, 41 aa, synthetic construct
METVRDPILWRYFLLRDLPSWSSVDWKSLPDLEILKKPISE

SEQ ID NO: 734 - protein, 41 aa, synthetic construct
MILWRYFLLRDLPSWSSVDWKSLPDLEILKKPISEVTDGAF

SEQ ID NO: 735 - protein, 41 aa, synthetic construct
MLTGHQSLTSGMELKDNILVSGNADSTVKIWDIKTGQCLQT

SEQ ID NO: 736 - protein, 41 aa, synthetic construct
MLKDNILVSGNADSTVKIWDIKTGQCLQTLQGPNKHQSAVT

SEQ ID NO: 737 - protein, 41 aa, synthetic construct
MKGIFDEYSQITSLVTEEIVNVHKEIQMSVEQIDPSTEYNN

SEQ ID NO: 738 - protein, 41 aa, synthetic construct
MLVTEEIVNVHKEIQMSVEQIDPSTEYNNFIDVHRTTAAKE

SEQ ID NO: 739 - protein, 41 aa, synthetic construct
MVNVHKEIQMSVEQIDPSTEYNNFIDVHRTTAAKEQEIEFD

SEQ ID NO: 740 - protein, 41 aa, synthetic construct
MTEAKFSAQKELLEQKVQENDGKEPPPVVNYEEDARSVTSM

SEQ ID NO: 741 - protein, 41 aa, synthetic construct
MAQKELLEQKVQENDGKEPPPVVNYEEDARSVTSMERKERL

SEQ ID NO: 742 - protein, 41 aa, synthetic construct
MGVCTQRQPVYIIMELVSGGDFLTFLRRKKDELKLKQLVKF

SEQ ID NO: 743 - protein, 41 aa, synthetic construct
MGDFLTFLRRKKDELKLKQLVKFSLDAAAGMLYLESKNCIH

SEQ ID NO: 744 - protein, 41 aa, synthetic construct
MLRRKKDELKLKQLVKFSLDAAAGMLYLESKNCIHRDLAAR

SEQ ID NO: 745 - protein, 41 aa, synthetic construct
MIYPDGKVNGSHEANMLSVLEIFAVSQGIVGIRGVFSNKFL

SEQ ID NO: 746 - protein, 41 aa, synthetic construct
MVNGSHEANMLSVLEIFAVSQGIVGIRGVFSNKFLAMSKKG

SEQ ID NO: 747 - protein, 41 aa, synthetic construct
MANMLSVLEIFAVSQGIVGIRGVFSNKFLAMSKKGKLHASA

SEQ ID NO: 748 - protein, 41 aa, synthetic construct
MYELPEDPKWEFPRDKLTLGKPLGEGCFGQVVMAEAVGIDK

SEQ ID NO: 749 - protein, 41 aa, synthetic construct
MPKWEFPRDKLTLGKPLGEGCFGQVVMAEAVGIDKDKPKEA

SEQ ID NO: 750 - protein, 41 aa, synthetic construct
MGKPLGEGCFGQVVMAEAVGIDKDKPKEAVTVAVKMLKDDA

SEQ ID NO: 751 - protein, 41 aa, synthetic construct
MAVAIVAGASSESLGTEQRVVGRAAEVPGPEPGQQEQLVFG

SEQ ID NO: 752 - protein, 41 aa, synthetic construct
MFSVRVTDAPSSGDDEDGEDEAEDTGVDTGAPYWTRPERMD

SEQ ID NO: 753 - protein, 41 aa, synthetic construct
MDAPSSGDDEDGEDEAEDTGVDTGAPYWTRPERMDKKLLAV

SEQ ID NO: 754 - protein, 41 aa, synthetic construct
MRLLGDASVSFTENCVVGIQANTERINKLMNESLMLVTALN

SEQ ID NO: 755 - protein, 41 aa, synthetic construct
MNCVVGIQANTERINKLMNESLMLVTALNPHIGYDKAAKIA

SEQ ID NO: 756 - protein, 41 aa, synthetic construct
MQANTERINKLMNESLMLVTALNPHIGYDKAAKIAKTAHKN

SEQ ID NO: 757 - protein, 41 aa, synthetic construct
MCLHTSFAWLLKACGSRLTEKLLEGAPTEDTLVQMEKLAGE

SEQ ID NO: 758 - protein, 41 aa, synthetic construct
MAPTEDTLVQMEKLAGEAGVLLPGPWPGWPWGGTSCLLSWQ

SEQ ID NO: 759 - protein, 41 aa, synthetic construct
MLAGEAGVLLPGPWPGWPWGGTSCLLSWQESLREGNAALNQ

SEQ ID NO: 760 - protein, 41 aa, synthetic construct
MPASFAVSLNGAKGAIDAKVHSPSGALEECYVTEIDQDKYA

SEQ ID NO: 761 - protein, 41 aa, synthetic construct
MGAIDAKVHSPSGALEECYVTEIDQDKYAVRFIPRENGVYL

SEQ ID NO: 762 - protein, 41 aa, synthetic construct
MEDEIEYENQKRLEEEEDLNVLTFEDLLCFAYQVAKGMEFL

SEQ ID NO: 763 - protein, 41 aa, synthetic construct
MENQKRLEEEEDLNVLTFEDLLCFAYQVAKGMEFLEFKSCV

SEQ ID NO: 764 - protein, 41 aa, synthetic construct
MTSLTVSTQSSPGTMMQQTPCYSFAPPNTSLNSPSPNYQKY

SEQ ID NO: 765 - protein, 41 aa, synthetic construct
MTQSSPGTMMQQTPCYSFAPPNTSLNSPSPNYQKYTYGQSS

SEQ ID NO: 766 - protein, 41 aa, synthetic construct
MVCTLEDPIYIITELMRHGSLQEYLQNDTGSKIHLTQQVDM

SEQ ID NO: 767 - protein, 41 aa, synthetic construct
MPIYIITELMRHGSLQEYLQNDTGSKIHLTQQVDMAAQVAS

SEQ ID NO: 768 - protein, 41 aa, synthetic construct
MNYIHRDLAARNVLVGEHNIYKVADFGLARVFKVDNEDIYE

SEQ ID NO: 769 - protein, 41 aa, synthetic construct
MLAARNVLVGEHNIYKVADFGLARVFKVDNEDIYESRHEIK

SEQ ID NO: 770 - protein, 41 aa, synthetic construct
MLVGEHNIYKVADFGLARVFKVDNEDIYESRHEIKLPVKWT

SEQ ID NO: 771 - protein, 41 aa, synthetic construct
MIYKVADFGLARVFKVDNEDIYESRHEIKLPVKWTAPEAIR

SEQ ID NO: 772 - protein, 41 aa, synthetic construct
MFGLARVFKVDNEDIYESRHEIKLPVKWTAPEAIRSNKFSI

SEQ ID NO: 773 - protein, 41 aa, synthetic construct
MFKVDNEDIYESRHEIKLPVKWTAPEAIRSNKFSIKSDVWS

SEQ ID NO: 774 - protein, 41 aa, synthetic construct
MQERAGVKMVMIQDGPQNTGADKPLRITGDPYKVQQAKEMV

SEQ ID NO: 775 - protein, 41 aa, synthetic construct
MDGPQNTGADKPLRITGDPYKVQQAKEMVLELIRDQGGFRE

SEQ ID NO: 776 - protein, 41 aa, synthetic construct
MGADKPLRITGDPYKVQQAKEMVLELIRDQGGFREVRNEYG

SEQ ID NO: 777 - protein, 41 aa, synthetic construct
MGFPSGGGGGGGQQRAGDWKCPNPTCENMNFSWRNECNQCK

SEQ ID NO: 778 - protein, 41 aa, synthetic construct
MGGGGGQQRAGDWKCPNPTCENMNFSWRNECNQCKAPKPDG

SEQ ID NO: 779 - protein, 41 aa, synthetic construct
MRGGTGVTLFVALYDYEARTEDDLSFHKGEKFQILNSSEGD

SEQ ID NO: 780 - protein, 41 aa, synthetic construct
MLSFARYFIGLISIICLSATLFTFLTFLIDVTRFRYPERPI

SEQ ID NO: 781 - protein, 41 aa, synthetic construct
MFIGLISIICLSATLFTFLTFLIDVTRFRYPERPIIFYAVC

SEQ ID NO: 782 - protein, 41 aa, synthetic construct
MIICLSATLFTFLTFLIDVTRFRYPERPIIFYAVCYMMVSL

SEQ ID NO: 783 - protein, 41 aa, synthetic construct
MTLFTFLTFLIDVTRFRYPERPIIFYAVCYMMVSLIFFIGF

SEQ ID NO: 784 - protein, 41 aa, synthetic construct
MERPIIFYAVCYMMVSLIFFIGFLLEDRVACNASIPAQYKA

SEQ ID NO: 785 - protein, 41 aa, synthetic construct
MEKKALLFHASAWGIPGTLTIILLAMNKIEGDNISGVCFVG

SEQ ID NO: 786 - protein, 41 aa, synthetic construct
MFHASAWGIPGTLTIILLAMNKIEGDNISGVCFVGLYDVDA

SEQ ID NO: 787 - protein, 41 aa, synthetic construct
MGIPGTLTIILLAMNKIEGDNISGVCFVGLYDVDALRYFVL

SEQ ID NO: 788 - protein, 41 aa, synthetic construct
MDIYVTSFGPVSDVEMEYTMDVFFRQTWTDERLKFGGPTEI

SEQ ID NO: 789 - protein, 41 aa, synthetic construct
MFGPVSDVEMEYTMDVFFRQTWTDERLKFGGPTEILSLNNL

SEQ ID NO: 790 - protein, 41 aa, synthetic construct
MPEESSSLLQYDLIGQTVSSETIKSNTGEYVIMTVYFHLQR

SEQ ID NO: 791 - protein, 41 aa, synthetic construct
MLLQYDLIGQTVSSETIKSNTGEYVIMTVYFHLQRKMGYFM

SEQ ID NO: 792 - protein, 41 aa, synthetic construct
MIKSKLGLDRDALVGLAILLGCDYLPKGVPGVGKEQALKLI

SEQ ID NO: 793 - protein, 41 aa, synthetic construct
MLDRDALVGLAILLGCDYLPKGVPGVGKEQALKLIQILKGQ

SEQ ID NO: 794 - protein, 41 aa, synthetic construct
MVGLAILLGCDYLPKGVPGVGKEQALKLIQILKGQSLLQRF

SEQ ID NO: 795 - protein, 41 aa, synthetic construct
MLTHYDMIERKLGSRNSNQLQPIRIVKTRIRNGVHCFEIEW

SEQ ID NO: 796 - protein, 41 aa, synthetic construct
MIERKLGSRNSNQLQPIRIVKTRIRNGVHCFEIEWEKPEHY

SEQ ID NO: 797 - protein, 41 aa, synthetic construct
MSRNSNQLQPIRIVKTRIRNGVHCFEIEWEKPEHYAMEDKQ

SEQ ID NO: 798 - protein, 41 aa, synthetic construct
MLQPIRIVKTRIRNGVHCFEIEWEKPEHYAMEDKQHGEFAL

SEQ ID NO: 799 - protein, 41 aa, synthetic construct
MVKTRIRNGVHCFEIEWEKPEHYAMEDKQHGEFALLTIEEE

SEQ ID NO: 800 - protein, 41 aa, synthetic construct
MGCSQEFDSQEQLVHHINSEHIHGERKEFVCHWGGCSRELR

SEQ ID NO: 801 - protein, 41 aa, synthetic construct
MDSQEQLVHHINSEHIHGERKEFVCHWGGCSRELRPFKAQY

SEQ ID NO: 802 - protein, 41 aa, synthetic construct
MVEEALKKLGIQVKVINAAHSFYNGTTTLPISDEDRTPRKR

SEQ ID NO: 803 - protein, 41 aa, synthetic construct
MKLGIQVKVINAAHSFYNGTTTLPISDEDRTPRKRISKTLN

SEQ ID NO: 804 - protein, 41 aa, synthetic construct
MKYFLDNLDKLGEPDYIPSQQDILLARRPTKGIHEYDFEIK

SEQ ID NO: 805 - protein, 41 aa, synthetic construct
MLDKLGEPDYIPSQQDILLARRPTKGIHEYDFEIKNVPFKM

SEQ ID NO: 806 - protein, 41 aa, synthetic construct
MPDYIPSQQDILLARRPTKGIHEYDFEIKNVPFKMVDVGGQ

SEQ ID NO: 807 - protein, 41 aa, synthetic construct
MQREANKKIEKQLQKDKQVYRATHRLLLLGAGESGKSTIVK

SEQ ID NO: 808 - protein, 41 aa, synthetic construct
MYRATHRLLLLGAGESGKSTIVKQMRILHVNGFNGEGGEED

SEQ ID NO: 809 - protein, 41 aa, synthetic construct
MGESGKSTIVKQMRILHVNGFNGEGGEEDPQAARSNSDGSE

SEQ ID NO: 810 - protein, 41 aa, synthetic construct
MHRYFMNITWDNRDYSFNEDGFLVNPSLVVISLTRDRTWEV

SEQ ID NO: 811 - protein, 41 aa, synthetic construct
MITWDNRDYSFNEDGFLVNPSLVVISLTRDRTWEVVGSWEQ

SEQ ID NO: 812 - protein, 41 aa, synthetic construct
MDAPRPEKRCCKGFCIDILKRLAHTIGFSYDLYLVTNGKHG

SEQ ID NO: 813 - protein, 41 aa, synthetic construct
MKRCCKGFCIDILKRLAHTIGFSYDLYLVTNGKHGKKIDGV

SEQ ID NO: 814 - protein, 41 aa, synthetic construct
MFCIDILKRLAHTIGFSYDLYLVTNGKHGKKIDGVWNGMIG

SEQ ID NO: 815 - protein, 41 aa, synthetic construct
MVARSNGTVSPSAFLEPYSPAVWVMMFVMCLTVVAVTVFIF

SEQ ID NO: 816 - protein, 41 aa, synthetic construct
MTVSPSAFLEPYSPAVWVMMFVMCLTVVAVTVFIFEYLSPV

SEQ ID NO: 817 - protein, 41 aa, synthetic construct
MFLEPYSPAVWVMMFVMCLTVVAVTVFIFEYLSPVGYNRSL

SEQ ID NO: 818 - protein, 41 aa, synthetic construct
MPAVWVMMFVMCLTVVAVTVFIFEYLSPVGYNRSLATGKRP

SEQ ID NO: 819 - protein, 41 aa, synthetic construct
MNIPFRSPSWYGIPRLEKIIQVGNRIKFVIKRPELLTHSTT

SEQ ID NO: 820 - protein, 41 aa, synthetic construct
MIQVGNRIKFVIKRPELLTHSTTEVTQPRTNTPVKEDWNVR

SEQ ID NO: 821 - protein, 41 aa, synthetic construct
MIKFVIKRPELLTHSTTEVTQPRTNTPVKEDWNVRITKLRK

SEQ ID NO: 822 - protein, 41 aa, synthetic construct
MRPELLTHSTTEVTQPRTNTPVKEDWNVRITKLRKQVEEIF

SEQ ID NO: 823 - protein, 41 aa, synthetic construct
MHSTTEVTQPRTNTPVKEDWNVRITKLRKQVEEIFNLKFAQ

SEQ ID NO: 824 - protein, 41 aa, synthetic construct
MGMSNPEVIRALERGYRMPRPENCPEELYNIMMRCWKNRPE

SEQ ID NO: 825 - protein, 41 aa, synthetic construct
MRGYRMPRPENCPEELYNIMMRCWKNRPEERPTFEYIQSVL

SEQ ID NO: 826 - protein, 41 aa, synthetic construct
MKKSAKTTLIKIDPALKIKTKKVNTADQCANRCTRNKGLPF

SEQ ID NO: 827 - protein, 41 aa, synthetic construct
MTLIKIDPALKIKTKKVNTADQCANRCTRNKGLPFTCKAFV

SEQ ID NO: 828 - protein, 41 aa, synthetic construct
MPALKIKTKKVNTADQCANRCTRNKGLPFTCKAFVFDKARK

SEQ ID NO: 829 - protein, 41 aa, synthetic construct
MTKKVNTADQCANRCTRNKGLPFTCKAFVFDKARKQCLWFP

SEQ ID NO: 830 - protein, 41 aa, synthetic construct
MLSQTRSGLTCSMWDKNMEDLHRHIFWEPDASKLNENYCRN

SEQ ID NO: 831 - protein, 41 aa, synthetic construct
MGLTCSMWDKNMEDLHRHIFWEPDASKLNENYCRNPDDDAH

SEQ ID NO: 832 - protein, 41 aa, synthetic construct
MTGQYRFLARSGGYLWTQTQATVVSGGRGPQSESIVCVHFL

SEQ ID NO: 833 - protein, 41 aa, synthetic construct
MYLWTQTQATVVSGGRGPQSESIVCVHFLISRVEETGVVLS

SEQ ID NO: 834 - protein, 41 aa, synthetic construct
MKSLVSKGTLVQTKGTGASGSFKLNKKAASGEAKPKVKKAG

SEQ ID NO: 835 - protein, 41 aa, synthetic construct
MGTLVQTKGTGASGSFKLNKKAASGEAKPKVKKAGGTKPKK

SEQ ID NO: 836 - protein, 41 aa, synthetic construct
MKAKKPAGAAKKPKKATGAATPKKSAKKTPKKAKKPAAAAG

SEQ ID NO: 837 - protein, 41 aa, synthetic construct
MKKATGAATPKKSAKKTPKKAKKPAAAAGAKKAKSPKKAKA

SEQ ID NO: 838 - protein, 41 aa, synthetic construct
MATPKKSAKKTPKKAKKPAAAAGAKKAKSPKKAKAAKPKKA

SEQ ID NO: 839 - protein, 41 aa, synthetic construct
MRTGEGFLCVFAINNTKSFEDIHQYREQIKRVKDSDDVPMV

SEQ ID NO: 840 - protein, 41 aa, synthetic construct
MREQIKRVKDSDDVPMVLVGNKCDLAARTVESRQAQDLARS

SEQ ID NO: 841 - protein, 41 aa, synthetic construct
MKGADKSSNFLYLQVKGEVEAKVEELKFDRYSVFRPGVLLC

SEQ ID NO: 842 - protein, 41 aa, synthetic construct
MSNFLYLQVKGEVEAKVEELKFDRYSVFRPGVLLCDRQESR

SEQ ID NO: 843 - protein, 41 aa, synthetic construct
MQVKGEVEAKVEELKFDRYSVFRPGVLLCDRQESRPGEWLV

SEQ ID NO: 844 - protein, 41 aa, synthetic construct
MESLTKMYSIPKDKQMLLFTHIRLAHGFSNHRKRLQAVQAR

SEQ ID NO: 845 - protein, 41 aa, synthetic construct
MHGFSNHRKRLQAVQARLHAISILVYSNALQESANSILYNG

SEQ ID NO: 846 - protein, 41 aa, synthetic construct
MVQARLHAISILVYSNALQESANSILYNGLIEELVDVLQIT

SEQ ID NO: 847 - protein, 41 aa, synthetic construct
MKECPFVIKPKIQRPNTTQEGEEMETDMDGVQCIPQRAALL

SEQ ID NO: 848 - protein, 41 aa, synthetic construct
MIKPKIQRPNTTQEGEEMETDMDGVQCIPQRAALLKSMLNF

SEQ ID NO: 849 - protein, 41 aa, synthetic construct
MGASQDSSSNQQDPGEPGEAEVQEEDHDVTQTEVADGDIMD

SEQ ID NO: 850 - protein, 41 aa, synthetic construct
MSSNQQDPGEPGEAEVQEEDHDVTQTEVADGDIMDGEAETD

SEQ ID NO: 851 - protein, 41 aa, synthetic construct
MPGEPGEAEVQEEDHDVTQTEVADGDIMDGEAETDSVVIAG

SEQ ID NO: 852 - protein, 41 aa, synthetic construct
MTLGTLQSSQQQPTLPTPPALGEVPQELQSPAGEGGSSTQL

SEQ ID NO: 853 - protein, 41 aa, synthetic construct
MSSQQQPTLPTPPALGEVPQELQSPAGEGGSSTQLLMPVEP

SEQ ID NO: 854 - protein, 41 aa, synthetic construct
MQELQSPAGEGGSSTQLLMPVEPEELGPTRPSGEAETTQME

SEQ ID NO: 855 - protein, 41 aa, synthetic construct
MAASTTVTTPTTATTTVSISPTTKGSKSPAKVSDGGSSSTD

SEQ ID NO: 856 - protein, 41 aa, synthetic construct
MTTTVSISPTTKGSKSPAKVSDGGSSSTDFKMVSSGLTENQ

SEQ ID NO: 857 - protein, 41 aa, synthetic construct
MSKSPAKVSDGGSSSTDFKMVSSGLTENQLQLSVEVLTSHS

SEQ ID NO: 858 - protein, 41 aa, synthetic construct
MSVINSEELSSILKLTWTNPSIKSVIILKYNIQYRTKDAST

SEQ ID NO: 859 - protein, 41 aa, synthetic construct
MELSSILKLTWTNPSIKSVIILKYNIQYRTKDASTWSQIPP

SEQ ID NO: 860 - protein, 41 aa, synthetic construct
MKLTWTNPSIKSVIILKYNIQYRTKDASTWSQIPPEDTAST

SEQ ID NO: 861 - protein, 41 aa, synthetic construct
MVMDLKAFPKDNMLWVEWTTPRESVKKYILEWCVLSDKAPC

SEQ ID NO: 862 - protein, 41 aa, synthetic construct
MFPKDNMLWVEWTTPRESVKKYILEWCVLSDKAPCITDWQQ

SEQ ID NO: 863 - protein, 41 aa, synthetic construct
MTPRESVKKYILEWCVLSDKAPCITDWQQEDGTVHRTYLRG

SEQ ID NO: 864 - protein, 41 aa, synthetic construct
MKKYILEWCVLSDKAPCITDWQQEDGTVHRTYLRGNLAESK

SEQ ID NO: 865 - protein, 41 aa, synthetic construct
MWCVLSDKAPCITDWQQEDGTVHRTYLRGNLAESKCYLITV

SEQ ID NO: 866 - protein, 41 aa, synthetic construct
MFRKLQEIYFIETKKFLLIGKSNICVKVGEKSLTCKKIDLT

SEQ ID NO: 867 - protein, 41 aa, synthetic construct
MIYFIETKKFLLIGKSNICVKVGEKSLTCKKIDLTTIVKPE

SEQ ID NO: 868 - protein, 41 aa, synthetic construct
MKKFLLIGKSNICVKVGEKSLTCKKIDLTTIVKPEAPFDLS

SEQ ID NO: 869 - protein, 41 aa, synthetic construct
MGKSNICVKVGEKSLTCKKIDLTTIVKPEAPFDLSVVYREG

SEQ ID NO: 870 - protein, 41 aa, synthetic construct
MYERFSRETDGAQKRRMLHCVQRALIRSQELGDEKIQIVSQ

SEQ ID NO: 871 - protein, 41 aa, synthetic construct
MIRSQELGDEKIQIVSQMVELVENRTRQVDSHVELFEAQQE

SEQ ID NO: 872 - protein, 41 aa, synthetic construct
MIVSQMVELVENRTRQVDSHVELFEAQQELGDTAGNSGKAG

SEQ ID NO: 873 - protein, 41 aa, synthetic construct
MELVENRTRQVDSHVELFEAQQELGDTAGNSGKAGADRPKG

SEQ ID NO: 874 - protein, 41 aa, synthetic construct
MDTAGNSGKAGADRPKGEAAAQADKPNSKRSRRQRNNENRE

SEQ ID NO: 875 - protein, 41 aa, synthetic construct
MAAQADKPNSKRSRRQRNNENRENASSNHDHDDGASGTPKE

SEQ ID NO: 876 - protein, 41 aa, synthetic construct
MEMVDKHIRRLDTDLARFEADLKEKQIESSDYDSSSSKGKK

SEQ ID NO: 877 - protein, 41 aa, synthetic construct
MKGKKKGRTQKEKKAARARSKGKNSDEEAPKTAQKKLKLVR

SEQ ID NO: 878 - protein, 41 aa, synthetic construct
MRTQKEKKAARARSKGKNSDEEAPKTAQKKLKLVRTSPEYG

SEQ ID NO: 879 - protein, 41 aa, synthetic construct
MPDIVSEKKPATEVDPTHFEKRFLKRIRDLGEGHFGKVELC

SEQ ID NO: 880 - protein, 41 aa, synthetic construct
MKKPATEVDPTHFEKRFLKRIRDLGEGHFGKVELCRYDPEG

SEQ ID NO: 881 - protein, 41 aa, synthetic construct
MVDPTHFEKRFLKRIRDLGEGHFGKVELCRYDPEGDNTGEQ

SEQ ID NO: 882 - protein, 41 aa, synthetic construct
MEKRFLKRIRDLGEGHFGKVELCRYDPEGDNTGEQVAVKSL

SEQ ID NO: 883 - protein, 41 aa, synthetic construct
MLKLKYLINLETLQSAFYTEKFEVKEPGSGPSGEEIFATII

SEQ ID NO: 884 - protein, 41 aa, synthetic construct
MINLETLQSAFYTEKFEVKEPGSGPSGEEIFATIIITGNGG

SEQ ID NO: 885 - protein, 41 aa, synthetic construct
MQSAFYTEKFEVKEPGSGPSGEEIFATIIITGNGGIQWSRG

SEQ ID NO: 886 - protein, 41 aa, synthetic construct
MEKFEVKEPGSGPSGEEIFATIIITGNGGIQWSRGKHKESE

SEQ ID NO: 887 - protein, 41 aa, synthetic construct
MNIIDVSIKQANQEGSNESRVVTIHKQDGKNLEIELSSLRE

SEQ ID NO: 888 - protein, 41 aa, synthetic construct
MEGSNESRVVTIHKQDGKNLEIELSSLREALSFVSLIDGYY

SEQ ID NO: 889 - protein, 41 aa, synthetic construct
MRVVTIHKQDGKNLEIELSSLREALSFVSLIDGYYRLTADA

SEQ ID NO: 890 - protein, 41 aa, synthetic construct
MEEYNLSGTKKNFSSLKDLLNCYQMETVRSDNIIFQFTKCC

SEQ ID NO: 891 - protein, 41 aa, synthetic construct
MSSLKDLLNCYQMETVRSDNIIFQFTKCCPPKPKDKSNLLV

SEQ ID NO: 892 - protein, 41 aa, synthetic construct
MIMEYLPYGSLRDYLQKHKERIDHIKLLQYTSQICKGMEYL

SEQ ID NO: 893 - protein, 41 aa, synthetic construct
MYGSLRDYLQKHKERIDHIKLLQYTSQICKGMEYLGTKRYI

SEQ ID NO: 894 - protein, 41 aa, synthetic construct
MCHRFGLRKDLASAILDLPVLEHLFAQHRSDLVSGRLPVGL

SEQ ID NO: 895 - protein, 41 aa, synthetic construct
MVLEHLFAQHRSDLVSGRLPVGLSLKEQGECLSLAVLDLAR

SEQ ID NO: 896 - protein, 41 aa, synthetic construct
MPVGLSLKEQGECLSLAVLDLARMAREQAQRPGELLKTVSY

SEQ ID NO: 897 - protein, 41 aa, synthetic construct
MREQAQRPGELLKTVSYKACLPPSLRDLIQGLSFVTRRRIR

SEQ ID NO: 898 - protein, 41 aa, synthetic construct
MHLQHIREQMAIALKRLKELEEQVRTIPVLQVKISVLQEEK

SEQ ID NO: 899 - protein, 41 aa, synthetic construct
MEQMAIALKRLKELEEQVRTIPVLQVKISVLQEEKRQLVSQ

SEQ ID NO: 900 - protein, 41 aa, synthetic construct
MSCKDAAVGTLVQMRNCGVSVTEAMLGVMTEADKEIELQQQ

SEQ ID NO: 901 - protein, 41 aa, synthetic construct
MMRNCGVSVTEAMLGVMTEADKEIELQQQTIESLKEKIYRL

SEQ ID NO: 902 - protein, 41 aa, synthetic construct
MEAVVQTRDQMVGSHMDLVDTCVGTSVETNSVGISCQPECK

SEQ ID NO: 903 - protein, 41 aa, synthetic construct
MRDQMVGSHMDLVDTCVGTSVETNSVGISCQPECKNKVVGP

SEQ ID NO: 904 - protein, 41 aa, synthetic construct
MPECKNKVVGPELPMNWWIVKERVEMHDRCAGRSVEMCDKS

SEQ ID NO: 905 - protein, 41 aa, synthetic construct
MVVGPELPMNWWIVKERVEMHDRCAGRSVEMCDKSVSVEVS

SEQ ID NO: 906 - protein, 41 aa, synthetic construct
MVKERVEMHDRCAGRSVEMCDKSVSVEVSVCETGSNTEESV

SEQ ID NO: 907 - protein, 41 aa, synthetic construct
MNTETATLIESCTNTCLSTLDKQTSTQTVETRTVAVGEGRV

SEQ ID NO: 908 - protein, 41 aa, synthetic construct
MLIESCTNTCLSTLDKQTSTQTVETRTVAVGEGRVKDINSS

SEQ ID NO: 909 - protein, 41 aa, synthetic construct
MPDGRKARGEVVDYSEQYRIRKRGNRKSSTSDWPTDNQDGW

SEQ ID NO: 910 - protein, 41 aa, synthetic construct
MIRKRGNRKSSTSDWPTDNQDGWDGKQENEERLFGSQEIMT

SEQ ID NO: 911 - protein, 41 aa, synthetic construct
MLDHKTLYYDVEPFLFYVLTQNDVKGCHLVGYFSKEKHCQQ

SEQ ID NO: 912 - protein, 41 aa, synthetic construct
MYYDVEPFLFYVLTQNDVKGCHLVGYFSKEKHCQQKYNVSC

SEQ ID NO: 913 - protein, 41 aa, synthetic construct
MHDSLPANSQPSRRGRWGRKNRKTQERFGDKDSKLLLEETS

SEQ ID NO: 914 - protein, 41 aa, synthetic construct
MNSQPSRRGRWGRKNRKTQERFGDKDSKLLLEETSSAPQEQ

SEQ ID NO: 915 - protein, 41 aa, synthetic construct
MRGRWGRKNRKTQERFGDKDSKLLLEETSSAPQEQYGECGE

SEQ ID NO: 916 - protein, 41 aa, synthetic construct
MKNRKTQERFGDKDSKLLLEETSSAPQEQYGECGEKSEATQ

SEQ ID NO: 917 - protein, 41 aa, synthetic construct
MERFGDKDSKLLLEETSSAPQEQYGECGEKSEATQEQYTES

SEQ ID NO: 918 - protein, 41 aa, synthetic construct
MDSKLLLEETSSAPQEQYGECGEKSEATQEQYTESEEQLVA

SEQ ID NO: 919 - protein, 41 aa, synthetic construct
MRRVRKRKHHNSSVVTETISETTEVLDEPFEDSDSERPMPR

SEQ ID NO: 920 - protein, 41 aa, synthetic construct
MLDEPFEDSDSERPMPRLEPTFEIDEEEEEEDENELFPREY

SEQ ID NO: 921 - protein, 41 aa, synthetic construct
MEEEEEEDENELFPREYFRRLSSQDVLRCQSSSKRKSKDEE

SEQ ID NO: 922 - protein, 41 aa, synthetic construct
MIPKAGRKPKIQESEETVEPKEDMPLPEERKEEEEMQAEAE

SEQ ID NO: 923 - protein, 41 aa, synthetic construct
MKPKIQESEETVEPKEDMPLPEERKEEEEMQAEAEEAEEGE

SEQ ID NO: 924 - protein, 41 aa, synthetic construct
MSEETVEPKEDMPLPEERKEEEEMQAEAEEAEEGEEEDAAS

SEQ ID NO: 925 - protein, 41 aa, synthetic construct
MADSSNSPETETKEPEVEEEEEKPRVSEEQRQSEEEQQELE

SEQ ID NO: 926 - protein, 41 aa, synthetic construct
MPETETKEPEVEEEEEKPRVSEEQRQSEEEQQELEEPEPEE

SEQ ID NO: 927 - protein, 41 aa, synthetic construct
MEEEKPRVSEEQRQSEEEQQELEEPEPEEEEDAAAETAQND

SEQ ID NO: 928 - protein, 41 aa, synthetic construct
MVSEEQRQSEEEQQELEEPEPEEEEDAAAETAQNDDHDADD

SEQ ID NO: 929 - protein, 41 aa, synthetic construct
MQSEEEQQELEEPEPEEEEDAAAETAQNDDHDADDEDDGHL

SEQ ID NO: 930 - protein, 41 aa, synthetic construct
MLEWAPRPVELPEVEYGRLGLQPLWTGGPGERREVVGTPSF

SEQ ID NO: 931 - protein, 41 aa, synthetic construct
MPVELPEVEYGRLGLQPLWTGGPGERREVVGTPSFLEEVLR

SEQ ID NO: 932 - protein, 41 aa, synthetic construct
MTSHLQDPNHLTLDWVANVEGLPEEEYTKQNLKRLWVVPAN

SEQ ID NO: 933 - protein, 41 aa, synthetic construct
MEGLPEEEYTKQNLKRLWVVPANKQINSFQVFVEEVLKIAL

SEQ ID NO: 934 - protein, 41 aa, synthetic construct
MEYTKQNLKRLWVVPANKQINSFQVFVEEVLKIALSDGFCI

SEQ ID NO: 935 - protein, 41 aa, synthetic construct
MSGKDMPKVQGLLENGDSVTSPEKVAPEEGSGKRDLELLSS

SEQ ID NO: 936 - protein, 41 aa, synthetic construct
MKVQGLLENGDSVTSPEKVAPEEGSGKRDLELLSSLLPQLT

SEQ ID NO: 937 - protein, 41 aa, synthetic construct
MENGDSVTSPEKVAPEEGSGKRDLELLSSLLPQLTGPVLEL

SEQ ID NO: 938 - protein, 41 aa, synthetic construct
MTSPEKVAPEEGSGKRDLELLSSLLPQLTGPVLELPEATRA

SEQ ID NO: 939 - protein, 41 aa, synthetic construct
MGDEEKKMAAGKASGESEEASPSLTAEEREALGGLDSRLFG

SEQ ID NO: 940 - protein, 41 aa, synthetic construct
MMAAGKASGESEEASPSLTAEEREALGGLDSRLFGFVRFHE

SEQ ID NO: 941 - protein, 41 aa, synthetic construct
MTNPNNPVTVIRGLAGALKLDLGLFSTKTLVEANNEHMVEV

SEQ ID NO: 942 - protein, 41 aa, synthetic construct
MVTVIRGLAGALKLDLGLFSTKTLVEANNEHMVEVRTQLLQ

SEQ ID NO: 943 - protein, 41 aa, synthetic construct
MCSVNINIGPGDCEWFVVPEGYWGVLNDFCEKNNLNFLMGS

SEQ ID NO: 944 - protein, 41 aa, synthetic construct
MIGPGDCEWFVVPEGYWGVLNDFCEKNNLNFLMGSWWPNLE

SEQ ID NO: 945 - protein, 41 aa, synthetic construct
MEWFVVPEGYWGVLNDFCEKNNLNFLMGSWWPNLEDLYEAN

SEQ ID NO: 946 - protein, 41 aa, synthetic construct
MEGYWGVLNDFCEKNNLNFLMGSWWPNLEDLYEANVPVYRF

SEQ ID NO: 947 - protein, 41 aa, synthetic construct
MLNDFCEKNNLNFLMGSWWPNLEDLYEANVPVYRFIQRPGD

SEQ ID NO: 948 - protein, 41 aa, synthetic construct
MRNIKVSDPKLFEMIKYCLLRTLKQCQTLREALIAAGKEII

SEQ ID NO: 949 - protein, 41 aa, synthetic construct
MDPKLFEMIKYCLLRTLKQCQTLREALIAAGKEIIWHGRTK

SEQ ID NO: 950 - protein, 41 aa, synthetic construct
MMIKYCLLRTLKQCQTLREALIAAGKEIIWHGRTKEEPAHY

SEQ ID NO: 951 - protein, 41 aa, synthetic construct
MLRTLKQCQTLREALIAAGKEIIWHGRTKEEPAHYCSICEV

SEQ ID NO: 952 - protein, 41 aa, synthetic construct
MAIECYKQGAFITLVARNEDKLLQAKKEIEMHSINDKQVVL

SEQ ID NO: 953 - protein, 41 aa, synthetic construct
MQGAFITLVARNEDKLLQAKKEIEMHSINDKQVVLCISVDV

SEQ ID NO: 954 - protein, 41 aa, synthetic construct
MDKLLQAKKEIEMHSINDKQVVLCISVDVSQDYNQVENVIK

SEQ ID NO: 955 - protein, 41 aa, synthetic construct
MAVVTLEPCEGADTYVNGKKVTEPSILRSGNRIIMGKSHVF

SEQ ID NO: 956 - protein, 41 aa, synthetic construct
MTYVNGKKVTEPSILRSGNRIIMGKSHVFRFNHPEQARQER

SEQ ID NO: 957 - protein, 41 aa, synthetic construct
MKVTEPSILRSGNRIIMGKSHVFRFNHPEQARQERERTPCA

SEQ ID NO: 958 - protein, 41 aa, synthetic construct
MAWDFLCVLLLLLRVQTGSSQPSVSPGEPSPPSIHPGKSDL

SEQ ID NO: 959 - protein, 41 aa, synthetic construct
MVLLLLLRVQTGSSQPSVSPGEPSPPSIHPGKSDLIVRVGD

SEQ ID NO: 960 - protein, 41 aa, synthetic construct
MKTSAYFNFAFKGNNKEQIHPHTLFTPLLIGFVIVAGMMCI

SEQ ID NO: 961 - protein, 41 aa, synthetic construct
MNFAFKGNNKEQIHPHTLFTPLLIGFVIVAGMMCIIVMILT

SEQ ID NO: 962 - protein, 41 aa, synthetic construct
MNNKEQIHPHTLFTPLLIGFVIVAGMMCIIVMILTYKYLQK

SEQ ID NO: 963 - protein, 41 aa, synthetic construct
MPCTYTMPSQFLPQQATYFPPSPPSSEPGSPDRQAEMLQNL

SEQ ID NO: 964 - protein, 41 aa, synthetic construct
MPSQFLPQQATYFPPSPPSSEPGSPDRQAEMLQNLTPPPSY

SEQ ID NO: 965 - protein, 41 aa, synthetic construct
MSSAKKATGRKKSSSHDSGTDITSVTLGDTTAVKTKILIKK

SEQ ID NO: 966 - protein, 41 aa, synthetic construct
MTGRKKSSSHDSGTDITSVTLGDTTAVKTKILIKKGRGNLE

SEQ ID NO: 967 - protein, 41 aa, synthetic construct
MSSHDSGTDITSVTLGDTTAVKTKILIKKGRGNLEKTNLDL

SEQ ID NO: 968 - protein, 41 aa, synthetic construct
MTDITSVTLGDTTAVKTKILIKKGRGNLEKTNLDLGPTAPS

SEQ ID NO: 969 - protein, 41 aa, synthetic construct
MPNDEEEEEVQLKSARRATSMDLPMPMRFRHLKKTSKEAVG

SEQ ID NO: 970 - protein, 41 aa, synthetic construct
MEEVQLKSARRATSMDLPMPMRFRHLKKTSKEAVGVYRSPI

SEQ ID NO: 971 - protein, 41 aa, synthetic construct
MGSLPLSGVEEKMFSLLKRAKVQLFKIDQQQQQKVAASMPL

SEQ ID NO: 972 - protein, 41 aa, synthetic construct
MFSLLKRAKVQLFKIDQQQQQKVAASMPLSPGGQMEEVAGA

SEQ ID NO: 973 - protein, 41 aa, synthetic construct
MRHSEEGETPDRRAGGQMKGLLLKLLESAFGWFDAHDPKYW

SEQ ID NO: 974 - protein, 41 aa, synthetic construct
METPDRRAGGQMKGLLLKLLESAFGWFDAHDPKYWRRSTRL

SEQ ID NO: 975 - protein, 41 aa, synthetic construct
MHLECDKPTDHELDTQLKEEYICMYCKHLGAEMDRLQPGEE

SEQ ID NO: 976 - protein, 41 aa, synthetic construct
MPTDHELDTQLKEEYICMYCKHLGAEMDRLQPGEEVEIAEL

SEQ ID NO: 977 - protein, 41 aa, synthetic construct
MEMDRLQPGEEVEIAELTTDYNNEMEVEGPEDQMVFSEQAA

SEQ ID NO: 978 - protein, 41 aa, synthetic construct
MMSNDSMKRQQQQDSIDPSSRIDSELFKDPLKQRESEHEQE

SEQ ID NO: 979 - protein, 41 aa, synthetic construct
MSRIDSELFKDPLKQRESEHEQEWKFRQQMRQKSKQQAKIE

SEQ ID NO: 980 - protein, 41 aa, synthetic construct
MKQRESEHEQEWKFRQQMRQKSKQQAKIEATQKLEQVKNEQ

SEQ ID NO: 981 - protein, 41 aa, synthetic construct
MPGGSHGTMPSQERFLVPPQQIQGSGVSPQLRRSVSVDMPR

SEQ ID NO: 982 - protein, 41 aa, synthetic construct
MTMPSQERFLVPPQQIQGSGVSPQLRRSVSVDMPRPLNNSQ

SEQ ID NO: 983 - protein, 41 aa, synthetic construct
MRFLVPPQQIQGSGVSPQLRRSVSVDMPRPLNNSQMNNPVG

SEQ ID NO: 984 - protein, 41 aa, synthetic construct
MPPPRVEFDDNNPFSESFQERERKERLREQQERQRIQLMQE

SEQ ID NO: 985 - protein, 41 aa, synthetic construct
MERERKERLREQQERQRIQLMQEVDRQRALQQRMEMEQHGM

SEQ ID NO: 986 - protein, 41 aa, synthetic construct
MRLREQQERQRIQLMQEVDRQRALQQRMEMEQHGMVGSEIS

SEQ ID NO: 987 - protein, 41 aa, synthetic construct
MERQRIQLMQEVDRQRALQQRMEMEQHGMVGSEISSSRTSV

SEQ ID NO: 988 - protein, 41 aa, synthetic construct
MNGDEFDLLAYTDPELDTGDKKDIFNEHLRLVESANEKAER

SEQ ID NO: 989 - protein, 41 aa, synthetic construct
MLLAYTDPELDTGDKKDIFNEHLRLVESANEKAEREALLRG

SEQ ID NO: 990 - protein, 41 aa, synthetic construct
MWKNNVYLARSRIQGLGLYAAKDLEKHTMVIEYIGTIIRNE

SEQ ID NO: 991 - protein, 41 aa, synthetic construct
MQGLGLYAAKDLEKHTMVIEYIGTIIRNEVANRREKIYEEQ

SEQ ID NO: 992 - protein, 41 aa, synthetic construct
MAAKDLEKHTMVIEYIGTIIRNEVANRREKIYEEQNRGIYM

SEQ ID NO: 993 - protein, 41 aa, synthetic construct
MYEEQNRGIYMFRINNEHVIDATLTGGPARYINHSCAPNCV

SEQ ID NO: 994 - protein, 41 aa, synthetic construct
MINNEHVIDATLTGGPARYINHSCAPNCVAEVVTFDKEDKI

SEQ ID NO: 995 - protein, 41 aa, synthetic construct
MCFARAIESSRDLLHRIKDEVGAPGIVVGVSVDGKEVWSEG

SEQ ID NO: 996 - protein, 41 aa, synthetic construct
MESSRDLLHRIKDEVGAPGIVVGVSVDGKEVWSEGLGYADV

SEQ ID NO: 997 - protein, 41 aa, synthetic construct
MLHRIKDEVGAPGIVVGVSVDGKEVWSEGLGYADVENRVPC

SEQ ID NO: 998 - protein, 41 aa, synthetic construct
MQALQKTNNRSIEAAIEFISKMSYQDPRREQMAAAAARPIN

SEQ ID NO: 999 - protein, 41 aa, synthetic construct
MNNRSIEAAIEFISKMSYQDPRREQMAAAAARPINASMKPG

SEQ ID NO: 1000 - protein, 41 aa, synthetic construct
MKQSWKGSKESLVPQRHGPPLGESVAYHSESPNSQTDVGRP

SEQ ID NO: 1001 - protein, 41 aa, synthetic construct
MSKESLVPQRHGPPLGESVAYHSESPNSQTDVGRPLSGSGI

SEQ ID NO: 1002 - protein, 41 aa, synthetic construct
MLLRSKSEQYDLDSLCAGMEQSLRAGPNEPEGGDKSRKSAK

SEQ ID NO: 1003 - protein, 41 aa, synthetic construct
MEQYDLDSLCAGMEQSLRAGPNEPEGGDKSRKSAKGDKGGK

SEQ ID NO: 1004 - protein, 41 aa, synthetic construct
MMFVKIKTLGIGAFGEVCLACKVDTHALYAMKTLRKKDVLN

SEQ ID NO: 1005 - protein, 41 aa, synthetic construct
MTLGIGAFGEVCLACKVDTHALYAMKTLRKKDVLNRNQVAH

SEQ ID NO: 1006 - protein, 41 aa, synthetic construct
MLLQIKCLAEGGDLNSFEFKSLTDSLNDIKSTIDASNISCF

SEQ ID NO: 1007 - protein, 41 aa, synthetic construct
MLAEGGDLNSFEFKSLTDSLNDIKSTIDASNISCFQNNVEI

SEQ ID NO: 1008 - protein, 41 aa, synthetic construct
MLNSFEFKSLTDSLNDIKSTIDASNISCFQNNVEIHVAHIQ

SEQ ID NO: 1009 - protein, 41 aa, synthetic construct
MGCRLGEVGRRLYYKLGRKLCRRDYLRLFGQDGLCASCDKR

SEQ ID NO: 1010 - protein, 41 aa, synthetic construct
MVHGDVIKHYKIRSLDNGGYYISPRITFPCISDMIKHYQKQ

SEQ ID NO: 1011 - protein, 41 aa, synthetic construct
MKHYKIRSLDNGGYYISPRITFPCISDMIKHYQKQADGLCR

SEQ ID NO: 1012 - protein, 41 aa, synthetic construct
MYHHHHHHAAGHHHHPTAGAPGAAGSAAASAGGAGGAGGGG

SEQ ID NO: 1013 - protein, 41 aa, synthetic construct
MHAAGHHHHPTAGAPGAAGSAAASAGGAGGAGGGGPASAGG

SEQ ID NO: 1014 - protein, 41 aa, synthetic construct
MPMAIFELLDYIVNEPPPKLPSGVFSLEFQDFVNKCLIKNP

SEQ ID NO: 1015 - protein, 41 aa, synthetic construct
MLLDYIVNEPPPKLPSGVFSLEFQDFVNKCLIKNPAERADL

SEQ ID NO: 1016 - protein, 41 aa, synthetic construct
MRKRVSPVPFQSGRITPPRRAPSPDGFSPYSPEETNRRVNK

SEQ ID NO: 1017 - protein, 41 aa, synthetic construct
MRAPSPDGFSPYSPEETNRRVNKVMRARLYLLQQIGPNSFL

SEQ ID NO: 1018 - protein, 41 aa, synthetic construct
MVVEACCSVLSMVCADPVYKVYVAALKTLRAMLVYTPCHSL

SEQ ID NO: 1019 - protein, 41 aa, synthetic construct
MCADPVYKVYVAALKTLRAMLVYTPCHSLAERIKLQRLLQP

SEQ ID NO: 1020 - protein, 41 aa, synthetic construct
MMSASQDALPIVPQLQVENGEDIIIIQQDTPETLPGHTKAK

SEQ ID NO: 1021 - protein, 41 aa, synthetic construct
MALPIVPQLQVENGEDIIIIQQDTPETLPGHTKAKQPYRED

SEQ ID NO: 1022 - protein, 41 aa, synthetic construct
MQLQVENGEDIIIIQQDTPETLPGHTKAKQPYREDTEWLKG

SEQ ID NO: 1023 - protein, 41 aa, synthetic construct
MDIGWPVFEIPSPRPSKGNEPEYEGDDTEGELKELESSTDE

SEQ ID NO: 1024 - protein, 41 aa, synthetic construct
MFEIPSPRPSKGNEPEYEGDDTEGELKELESSTDESEEEQI

SEQ ID NO: 1025 - protein, 41 aa, synthetic construct
MRPSKGNEPEYEGDDTEGELKELESSTDESEEEQISDPRVP

SEQ ID NO: 1026 - protein, 41 aa, synthetic construct
MLGILGSPSQEDLNCIINLKARNYLLSLPHKNKVPWNRLFP

SEQ ID NO: 1027 - protein, 41 aa, synthetic construct
MNCIINLKARNYLLSLPHKNKVPWNRLFPNADSKALDLLDK

SEQ ID NO: 1028 - protein, 41 aa, synthetic construct
MPFIYFFVGSSKKKRFKESLKVVLTRAFKDEMQPRRQKDNC

SEQ ID NO: 1029 - protein, 41 aa, synthetic construct
MVGSSKKKRFKESLKVVLTRAFKDEMQPRRQKDNCNTVTVE

SEQ ID NO: 1030 - protein, 41 aa, synthetic construct
MMKYGNDSSAELSELHSAALASLKGDIVELNKRLQQTERER

SEQ ID NO: 1031 - protein, 41 aa, synthetic construct
MSSAELSELHSAALASLKGDIVELNKRLQQTERERDLLEKK

SEQ ID NO: 1032 - protein, 41 aa, synthetic construct
MDMDNCSDLNSELQRVLTGLENVVCGRKKSSCSLSVAEVDR

SEQ ID NO: 1033 - protein, 41 aa, synthetic construct
MQRVLTGLENVVCGRKKSSCSLSVAEVDRHIEQLTTASEHC

SEQ ID NO: 1034 - protein, 41 aa, synthetic construct
MGRKKSSCSLSVAEVDRHIEQLTTASEHCDLAIKTVEEIEG

SEQ ID NO: 1035 - protein, 41 aa, synthetic construct
MCADAASPALSLAELRTTCSENELAAEFTNAIRREKKLKAR

SEQ ID NO: 1036 - protein, 41 aa, synthetic construct
MPALSLAELRTTCSENELAAEFTNAIRREKKLKARVQELVS

SEQ ID NO: 1037 - protein, 41 aa, synthetic construct
MMETAFDGFWEKHQLKMEQYLQLWKFEQDFQQLVTEVEFLL

SEQ ID NO: 1038 - protein, 41 aa, synthetic construct
MGFWEKHQLKMEQYLQLWKFEQDFQQLVTEVEFLLNQQAEL

SEQ ID NO: 1039 - protein, 41 aa, synthetic construct
MQLKMEQYLQLWKFEQDFQQLVTEVEFLLNQQAELADVTGT

SEQ ID NO: 1040 - protein, 41 aa, synthetic construct
MENCAHAPERVGPCFLERKDDFQMYAKYCQNKPRSETIWRK

SEQ ID NO: 1041 - protein, 41 aa, synthetic construct
MCFLERKDDFQMYAKYCQNKPRSETIWRKYSECAFFQECQR

SEQ ID NO: 1042 - protein, 41 aa, synthetic construct
MGSDRYPSYSFKHCWKMDEVGITEYVKGDNRKFEIWYGEKE

SEQ ID NO: 1043 - protein, 41 aa, synthetic construct
MSYSFKHCWKMDEVGITEYVKGDNRKFEIWYGEKEEVYIVQ

SEQ ID NO: 1044 - protein, 41 aa, synthetic construct
MVKKRKQQDQLTERDKFQISLQQNDEKQQGAFISTEETELE

SEQ ID NO: 1045 - protein, 41 aa, synthetic construct
MQDQLTERDKFQISLQQNDEKQQGAFISTEETELEHTSTVV

SEQ ID NO: 1046 - protein, 41 aa, synthetic construct
MLLKSVGAQKDTYTMKEVLFYLGQYIMTKRLYDEKQQHIVY

SEQ ID NO: 1047 - protein, 41 aa, synthetic construct
MTMKEVLFYLGQYIMTKRLYDEKQQHIVYCSNDLLGDLFGV

SEQ ID NO: 1048 - protein, 41 aa, synthetic construct
MFYLGQYIMTKRLYDEKQQHIVYCSNDLLGDLFGVPSFSVK

SEQ ID NO: 1049 - protein, 41 aa, synthetic construct
MFDESLALCVIREICCERSSSSESTGTPSNPDLDAGVSEHS

SEQ ID NO: 1050 - protein, 41 aa, synthetic construct
MICCERSSSSESTGTPSNPDLDAGVSEHSGDWLDQDSVSDQ

SEQ ID NO: 1051 - protein, 41 aa, synthetic construct
MSDSACRISPGQINQVRPKLPLLKILHAAGAQGEMFTVKEV

SEQ ID NO: 1052 - protein, 41 aa, synthetic construct
MISPGQINQVRPKLPLLKILHAAGAQGEMFTVKEVMHYLGQ

SEQ ID NO: 1053 - protein, 41 aa, synthetic construct
MNQVRPKLPLLKILHAAGAQGEMFTVKEVMHYLGQYIMVKQ

SEQ ID NO: 1054 - protein, 41 aa, synthetic construct
MVKEVMHYLGQYIMVKQLYDQQEQHMVYCGGDLLGELLGRQ

SEQ ID NO: 1055 - protein, 41 aa, synthetic construct
MPKDAYIKKENSKLFDPCNSVEFLDLAHSSESQETISSMGE

SEQ ID NO: 1056 - protein, 41 aa, synthetic construct
MKKENSKLFDPCNSVEFLDLAHSSESQETISSMGEQLDNLS

SEQ ID NO: 1057 - protein, 41 aa, synthetic construct
MYVGEQRSNLKDPSYGWEVHLPRSRRVSVHSWLYLGKRSSD

SEQ ID NO: 1058 - protein, 41 aa, synthetic construct
MSNLKDPSYGWEVHLPRSRRVSVHSWLYLGKRSSDVGIAFS

SEQ ID NO: 1059 - protein, 41 aa, synthetic construct
MQRDDARHAIKKITKDILKVLNRKGTAETDQLAPIVPLNPG

SEQ ID NO: 1060 - protein, 41 aa, synthetic construct
MHAIKKITKDILKVLNRKGTAETDQLAPIVPLNPGDLTFLG

SEQ ID NO: 1061 - protein, 41 aa, synthetic construct
MSSCDRHLLAASQNRIVDGAVFAVLKAVFVLGDAELKGSGF

SEQ ID NO: 1062 - protein, 41 aa, synthetic construct
MLLAASQNRIVDGAVFAVLKAVFVLGDAELKGSGFTVTGGT

SEQ ID NO: 1063 - protein, 41 aa, synthetic construct
MAVFAVLKAVFVLGDAELKGSGFTVTGGTEELPEEEGGGGS

SEQ ID NO: 1064 - protein, 41 aa, synthetic construct
MTGGTEELPEEEGGGGSGGRRQGGRNISVETASLDVYAKYV

SEQ ID NO: 1065 - protein, 41 aa, synthetic construct
MRRQGGRNISVETASLDVYAKYVLRSICQQEWVGERCLKSL

SEQ ID NO: 1066 - protein, 41 aa, synthetic construct
MRQSSLELQLMIKQTPNNEMNSLLENIAKATIEVFQQSAET

SEQ ID NO: 1067 - protein, 41 aa, synthetic construct
MMNSLLENIAKATIEVFQQSAETGSSSGSTASNMPSSSKTK

SEQ ID NO: 1068 - protein, 41 aa, synthetic construct
MYLKGSYMRCDRKMEVAFMVCAINPSIDLHTDSLELLQLQQ

SEQ ID NO: 1069 - protein, 41 aa, synthetic construct
MVCAINPSIDLHTDSLELLQLQQKLLWLLYDLGHLERYPMA

SEQ ID NO: 1070 - protein, 41 aa, synthetic construct
MDSLELLQLQQKLLWLLYDLGHLERYPMALGNLADLEELEP

SEQ ID NO: 1071 - protein, 41 aa, synthetic construct
MEVANDVIPNLLKEAASLLEAGEERPGEQSQGTQSQGSALQ

SEQ ID NO: 1072 - protein, 41 aa, synthetic construct
MEAGEERPGEQSQGTQSQGSALQDPECFAHLLRFYDGICKW

SEQ ID NO: 1073 - protein, 41 aa, synthetic construct
MESKPEEPPPPKKPALDKGLGTGQGAVSGPPRKPPGTVAGT

SEQ ID NO: 1074 - protein, 41 aa, synthetic construct
MLGTGQGAVSGPPRKPPGTVAGTARGPEGGSTAQVPAPAAS

SEQ ID NO: 1075 - protein, 41 aa, synthetic construct
MKDGFMFLTDQSYIDVLPEFRDSYPIKYVHAFESNNFIYFL

SEQ ID NO: 1076 - protein, 41 aa, synthetic construct
MLTDQSYIDVLPEFRDSYPIKYVHAFESNNFIYFLTVQRET

SEQ ID NO: 1077 - protein, 41 aa, synthetic construct
MIDVLPEFRDSYPIKYVHAFESNNFIYFLTVQRETLDAQTF

SEQ ID NO: 1078 - protein, 41 aa, synthetic construct
MIKYVHAFESNNFIYFLTVQRETLDAQTFHTRIIRFCSINS

SEQ ID NO: 1079 - protein, 41 aa, synthetic construct
MFESNNFIYFLTVQRETLDAQTFHTRIIRFCSINSGLHSYM

SEQ ID NO: 1080 - protein, 41 aa, synthetic construct
MQRETLDAQTFHTRIIRFCSINSGLHSYMEMPLECILTEKR

SEQ ID NO: 1081 - protein, 41 aa, synthetic construct
MAQTFHTRIIRFCSINSGLHSYMEMPLECILTEKRKKRSTK

SEQ ID NO: 1082 - protein, 41 aa, synthetic construct
MKSFISGGSTITGVGKNLNSVSVPRMVINVHEAGRNFTVAC

SEQ ID NO: 1083 - protein, 41 aa, synthetic construct
MGSTITGVGKNLNSVSVPRMVINVHEAGRNFTVACQHRSNS

SEQ ID NO: 1084 - protein, 41 aa, synthetic construct
MLDGILSKYFDLIYVHNPVFKPFEKPVMISMGNENVLEIKG

SEQ ID NO: 1085 - protein, 41 aa, synthetic construct
MKYFDLIYVHNPVFKPFEKPVMISMGNENVLEIKGNDIDPE

SEQ ID NO: 1086 - protein, 41 aa, synthetic construct
MYVHNPVFKPFEKPVMISMGNENVLEIKGNDIDPEAVKGEV

SEQ ID NO: 1087 - protein, 41 aa, synthetic construct
MSLIVHFNEVIGRGHFGCVYHGTLLDNDGKKIHCAVKSLNR

SEQ ID NO: 1088 - protein, 41 aa, synthetic construct
MYHGTLLDNDGKKIHCAVKSLNRITDIGEVSQFLTEGIIMK

SEQ ID NO: 1089 - protein, 41 aa, synthetic construct
MDNDGKKIHCAVKSLNRITDIGEVSQFLTEGIIMKDFSHPN

SEQ ID NO: 1090 - protein, 41 aa, synthetic construct
MPLVVLPYMKHGDLRNFIRNETHNPTVKDLIGFGLQVAKGM

SEQ ID NO: 1091 - protein, 41 aa, synthetic construct
MYMKHGDLRNFIRNETHNPTVKDLIGFGLQVAKGMKYLASK

SEQ ID NO: 1092 - protein, 41 aa, synthetic construct
MLCGERELEEKCLDIHRQIALQEKHDAEGLSRLAKVVDEAL

SEQ ID NO: 1093 - protein, 41 aa, synthetic construct
MLEEKCLDIHRQIALQEKHDAEGLSRLAKVVDEALARDFEL

SEQ ID NO: 1094 - protein, 41 aa, synthetic construct
MEGIREEEEQLKEKKKRKKLEYTICETEPEQPVRHYPLWVK

SEQ ID NO: 1095 - protein, 41 aa, synthetic construct
MEEQLKEKKKRKKLEYTICETEPEQPVRHYPLWVKVEGEVD

SEQ ID NO: 1096 - protein, 41 aa, synthetic construct
MKKKRKKLEYTICETEPEQPVRHYPLWVKVEGEVDPEPVYI

SEQ ID NO: 1097 - protein, 41 aa, synthetic construct
MLEYTICETEPEQPVRHYPLWVKVEGEVDPEPVYIPTPSVI

SEQ ID NO: 1098 - protein, 41 aa, synthetic construct
MSLLSSGASFVSQAGTLTLRISPPEPQSFASKTGSETKITY

SEQ ID NO: 1099 - protein, 41 aa, synthetic construct
MASFVSQAGTLTLRISPPEPQSFASKTGSETKITYSSGGQP

SEQ ID NO: 1100 - protein, 41 aa, synthetic construct
MAHLKTTAAHTQSFKQPSCTHISADEKAAERSRKAPPIPLK

SEQ ID NO: 1101 - protein, 41 aa, synthetic construct
MAAHTQSFKQPSCTHISADEKAAERSRKAPPIPLKLKPDYW

SEQ ID NO: 1102 - protein, 41 aa, synthetic construct
MTHISADEKAAERSRKAPPIPLKLKPDYWSDKLQKEAEAFA

SEQ ID NO: 1103 - protein, 41 aa, synthetic construct
MEKAAERSRKAPPIPLKLKPDYWSDKLQKEAEAFAYYRRTH

SEQ ID NO: 1104 - protein, 41 aa, synthetic construct
MYNIATRRKALKNPSEEYGKILEVVGRYSVHNAGISFSVKK

SEQ ID NO: 1105 - protein, 41 aa, synthetic construct
MRKALKNPSEEYGKILEVVGRYSVHNAGISFSVKKQGETVA

SEQ ID NO: 1106 - protein, 41 aa, synthetic construct
MMSKEPKPDSNLLTITSGQDKKAPSKRPPISDSEELSAKKR

SEQ ID NO: 1107 - protein, 41 aa, synthetic construct
MPDSNLLTITSGQDKKAPSKRPPISDSEELSAKKRKKSSSE

SEQ ID NO: 1108 - protein, 41 aa, synthetic construct
MTITSGQDKKAPSKRPPISDSEELSAKKRKKSSSEALFKSF

SEQ ID NO: 1109 - protein, 41 aa, synthetic construct
MDKKAPSKRPPISDSEELSAKKRKKSSSEALFKSFSSAPPL

SEQ ID NO: 1110 - protein, 41 aa, synthetic construct
MRPVNRGGSRSRRVSLSDGSDSESSSASSPLHHEPPPPLLK

SEQ ID NO: 1111 - protein, 41 aa, synthetic construct
MPLLKTNNNQILEVKSPIKQSKSDKQIKNGECDKAYLDELV

SEQ ID NO: 1112 - protein, 41 aa, synthetic construct
MSLGTIIMEFGGNVTLHQVIYGAAGHPEGDAGEPHCRTGGQ

SEQ ID NO: 1113 - protein, 41 aa, synthetic construct
MVTLHQVIYGAAGHPEGDAGEPHCRTGGQLSLGKCLKYSLD

SEQ ID NO: 1114 - protein, 41 aa, synthetic construct
MQGVIKYMGPAGAKNLQSVVLSKMNFESFVKDLLLVRQYRV

SEQ ID NO: 1115 - protein, 41 aa, synthetic construct
MMGPAGAKNLQSVVLSKMNFESFVKDLLLVRQYRVEVYKNR

SEQ ID NO: 1116 - protein, 41 aa, synthetic construct
MSRHACVEVQDEIAFIPNDVYFEKDKQMFHIITGPNMGGKS

SEQ ID NO: 1117 - protein, 41 aa, synthetic construct
MEVQDEIAFIPNDVYFEKDKQMFHIITGPNMGGKSTYIRQT

SEQ ID NO: 1118 - protein, 41 aa, synthetic construct
MKRLLKPYTGSKSKEAQKGGHFYSAKPEILRAMQRADEALN

SEQ ID NO: 1119 - protein, 41 aa, synthetic construct
MYTGSKSKEAQKGGHFYSAKPEILRAMQRADEALNKDKIKR

SEQ ID NO: 1120 - protein, 41 aa, synthetic construct
MAMQRADEALNKDKIKRLELAVCDEPSEPEEEEEMEVGTTY

SEQ ID NO: 1121 - protein, 41 aa, synthetic construct
MTLNNLEIFLNGTNGSTEGTLLERVDTCHTPFGKRLLKQWL

SEQ ID NO: 1122 - protein, 41 aa, synthetic construct
MIFLNGTNGSTEGTLLERVDTCHTPFGKRLLKQWLCAPLCN

SEQ ID NO: 1123 - protein, 41 aa, synthetic construct
MLLKKLPDLERLLSKIHNVGSPLKSQNHPDSRAIMYEETTY

SEQ ID NO: 1124 - protein, 41 aa, synthetic construct
MDLERLLSKIHNVGSPLKSQNHPDSRAIMYEETTYSKKKII

SEQ ID NO: 1125 - protein, 41 aa, synthetic construct
MQKPQWYRHTFEEAEKGFDETLAKEKGMNRDDRIHGALLIL

SEQ ID NO: 1126 - protein, 41 aa, synthetic construct
METLAKEKGMNRDDRIHGALLILNELVRISSMEGERLREEM

SEQ ID NO: 1127 - protein, 41 aa, synthetic construct
MKGMNRDDRIHGALLILNELVRISSMEGERLREEMEEITQQ

SEQ ID NO: 1128 - protein, 41 aa, synthetic construct
MDRIHGALLILNELVRISSMEGERLREEMEEITQQQLVHDK

SEQ ID NO: 1129 - protein, 41 aa, synthetic construct
MMEGERLREEMEEITQQQLVHDKYCKDLMGFGTKPRHITPF

SEQ ID NO: 1130 - protein, 41 aa, synthetic construct
MVDELFIIIMDMLQDSSLLAKRQVALWTLGQLVASTGYVVE

SEQ ID NO: 1131 - protein, 41 aa, synthetic construct
MIIMDMLQDSSLLAKRQVALWTLGQLVASTGYVVEPYRKYP

SEQ ID NO: 1132 - protein, 41 aa, synthetic construct
MDLFSLAQQCIDKARDLLDAELTAMAGESYSRAYGAMVSCH

SEQ ID NO: 1133 - protein, 41 aa, synthetic construct
MQQCIDKARDLLDAELTAMAGESYSRAYGAMVSCHMLSELE

SEQ ID NO: 1134 - protein, 41 aa, synthetic construct
MLLLGVDPSRQLDHPLPTVHPQVTYAYMKNMWKSARKIDAF

SEQ ID NO: 1135 - protein, 41 aa, synthetic construct
  VARIANT 13: note = X can be any amino acid
  VARIANT 19: note = X can be any amino acid
  VARIANT 21: note = X can be any amino acid
  VARIANT 37: note = X can be any amino acid
MSYPSDNSTILFXGPHRQXHXRPRCWIRTSQWCSRYXRFVC

SEQ ID NO: 1136 - protein, 41 aa, synthetic construct
  VARIANT 7: note = X can be any amino acid
  VARIANT 13: note = X can be any amino acid
  VARIANT 15: note = X can be any amino acid
  VARIANT 31: note = X can be any amino acid
MSTILFXGPHRQXHXRPRCWIRTSQWCSRYXRFVCSTIRVL

SEQ ID NO: 1137 - protein, 41 aa, synthetic construct
  VARIANT 7: note = X can be any amino acid
  VARIANT 9: note = X can be any amino acid
  VARIANT 25: note = X can be any amino acid
MGPHRQXHXRPRCWIRTSQWCSRYXRFVCSTIRVLCDLSSD

SEQ ID NO: 1138 - protein, 41 aa, synthetic construct
  VARIANT 13: note = X can be any amino acid
MWIRTSQWCSRYXRFVCSTIRVLCDLSSDRSNPGWFLSILH

SEQ ID NO: 1139 - protein, 41 aa, synthetic construct
MRFVCSTIRVLCDLSSDRSNPGWFLSILHFFQYERIREMGP

SEQ ID NO: 1140 - protein, 41 aa, synthetic construct
  VARIANT 38: note = X can be any amino acid
MIRVLCDLSSDRSNPGWFLSILHFFQYERIREMGPTSXSAP

SEQ ID NO: 1141 - protein, 41 aa, synthetic construct
  VARIANT 32: note = X can be any amino acid
  VARIANT 38: note = X can be any amino acid
MLSSDRSNPGWFLSILHFFQYERIREMGPTSXSAPAPXMIL

SEQ ID NO: 1142 - protein, 41 aa, synthetic construct
  VARIANT 4: note = X can be any amino acid
  VARIANT 14: note = X can be any amino acid
MNKXDEKTLCMELXFINANKNLSLQALAYYPCIKIFGWGDL

SEQ ID NO: 1143 - protein, 41 aa, synthetic construct
  VARIANT 8: note = X can be any amino acid
  VARIANT 38: note = X can be any amino acid
MTLCMELXFINANKNLSLQALAYYPCIKIFGWGDLRAXFNL

SEQ ID NO: 1144 - protein, 41 aa, synthetic construct
  VARIANT 2: note = X can be any amino acid
  VARIANT 32: note = X can be any amino acid
  VARIANT 39: note = X can be any amino acid
MXFINANKNLSLQALAYYPCIKIFGWGDLRAXFNLRATXTK

SEQ ID NO: 1145 - protein, 41 aa, synthetic construct
  VARIANT 15: note = X can be any amino acid
  VARIANT 36: note = X can be any amino acid
MVNRRNRYSTARERXKIITKHNTARTNPCTFCIMNXLEITL

SEQ ID NO: 1146 - protein, 41 aa, synthetic construct
  VARIANT 9: note = X can be any amino acid
  VARIANT 30: note = X can be any amino acid
MYSTARERXKIITKHNTARTNPCTFCIMNXLEITLQREPKL

SEQ ID NO: 1147 - protein, 41 aa, synthetic construct
  VARIANT 3: note = X can be any amino acid
  VARIANT 24: note = X can be any amino acid
MRXKIITKHNTARTNPCTFCIMNXLEITLQREPKLRPPKPD

SEQ ID NO: 1148 - protein, 41 aa, synthetic construct
  VARIANT 4: note = X can be any amino acid
  VARIANT 9: note = X can be any amino acid
  VARIANT 26: note = X can be any amino acid
MAKXWEDLXVEATNLSSLVIAGCPRXNLSSTLNLPTEPSKS

SEQ ID NO: 1149 - protein, 41 aa, synthetic construct
  VARIANT 3: note = X can be any amino acid
  VARIANT 20: note = X can be any amino acid
MLXVEATNLSSLVIAGCPRXNLSSTLNLPTEPSKSPCKFNC

SEQ ID NO: 1150 - protein, 41 aa, synthetic construct
  VARIANT 7: note = X can be any amino acid
  VARIANT 20: note = X can be any amino acid
  VARIANT 25: note = X can be any amino acid
  VARIANT 32: note = X can be any amino acid
MPIMLIXTFSIAYVYIRLEXPTDSXQPNINKXYNKHPIIYT

SEQ ID NO: 1151 - protein, 41 aa, synthetic construct
  VARIANT 14: note = X can be any amino acid
  VARIANT 19: note = X can be any amino acid
  VARIANT 26: note = X can be any amino acid
MTFSIAYVYIRLEXPTDSXQPNINKXYNKHPIIYTVNPTKV

SEQ ID NO: 1152 - protein, 41 aa, synthetic construct
  VARIANT 8: note = X can be any amino acid
  VARIANT 13: note = X can be any amino acid
  VARIANT 20: note = X can be any amino acid
MVYIRLEXPTDSXQPNINKXYNKHPIIYTVNPTKVCSKERL

SEQ ID NO: 1153 - protein, 41 aa, synthetic construct
  VARIANT 2: note = X can be any amino acid
  VARIANT 7: note = X can be any amino acid
  VARIANT 14: note = X can be any amino acid
MXPTDSXQPNINKXYNKHPIIYTVNPTKVCSKERLQKVRGT

SEQ ID NO: 1154 - protein, 41 aa, synthetic construct
  VARIANT 8: note = X can be any amino acid
  VARIANT 36: note = X can be any amino acid
MQPNINKXYNKHPIIYTVNPTKVCSKERLQKVRGTXQILPH

SEQ ID NO: 1155 - protein, 41 aa, synthetic construct
  VARIANT 2: note = X can be any amino acid
  VARIANT 30: note = X can be any amino acid
MXYNKHPIIYTVNPTKVCSKERLQKVRGTXQILPHLFTKNI

SEQ ID NO: 1156 - protein, 41 aa, synthetic construct
  VARIANT 23: note = X can be any amino acid
  VARIANT 34: note = X can be any amino acid
  VARIANT 38: note = X can be any amino acid
MLESISTIEFTTSMLDQDILMVXPLLRVCLFNDXSPMXSQF

SEQ ID NO: 1157 - protein, 41 aa, synthetic construct
  VARIANT 11: note = X can be any amino acid
  VARIANT 22: note = X can be any amino acid
  VARIANT 26: note = X can be any amino acid
  VARIANT 33: note = X can be any amino acid
MMLDQDILMVXPLLRVCLFNDXSPMXSQFRPEXSRSVSTYL

SEQ ID NO: 1158 - protein, 41 aa, synthetic construct
  VARIANT 10: note = X can be any amino acid
  VARIANT 14: note = X can be any amino acid
  VARIANT 21: note = X can be any amino acid
MLRVCLFNDXSPMXSQFRPEXSRSVSTYLTFLLLRKDKRNR

SEQ ID NO: 1159 - protein, 41 aa, synthetic construct
  VARIANT 4: note = X can be any amino acid
  VARIANT 8: note = X can be any amino acid
  VARIANT 15: note = X can be any amino acid
MNDXSPMXSQFRPEXSRSVSTYLTFLLLRKDKRNRAHFIKC

SEQ ID NO: 1160 - protein, 41 aa, synthetic construct
  VARIANT 34: note = X can be any amino acid
MHPNSVAAIKGSFFQLLKSHVISVQIGVIQVGFXLFNISPS

SEQ ID NO: 1161 - protein, 41 aa, synthetic construct
  VARIANT 28: note = X can be any amino acid
MAIKGSFFQLLKSHVISVQIGVIQVGFXLFNISPSTKGQEK

SEQ ID NO: 1162 - protein, 41 aa, synthetic construct
  VARIANT 22: note = X can be any amino acid
MFQLLKSHVISVQIGVIQVGFXLFNISPSTKGQEKQGPFHK

SEQ ID NO: 1163 - protein, 40 aa, synthetic construct
  VARIANT 16: note = X can be any amino acid
MHVISVQIGVIQVGFXLFNISPSTKGQEKQGPFHKAPLPP

SEQ ID NO: 1164 - protein, 41 aa, synthetic construct
  VARIANT 3: note = X can be any amino acid
  VARIANT 13: note = X can be any amino acid
  VARIANT 14: note = X can be any amino acid
  VARIANT 35: note = X can be any amino acid
MSXKSTLIYVAKXXEDSLVAVTSLRRLVIADCPRXNFSSTL

SEQ ID NO: 1165 - protein, 41 aa, synthetic construct
  VARIANT 7: note = X can be any amino acid
  VARIANT 8: note = X can be any amino acid
  VARIANT 29: note = X can be any amino acid
MIYVAKXXEDSLVAVTSLRRLVIADCPRXNFSSTLNLTYRI

SEQ ID NO: 1166 - protein, 41 aa, synthetic construct
  VARIANT 5: note = X can be any amino acid
  VARIANT 8: note = X can be any amino acid
  VARIANT 10: note = X can be any amino acid
  VARIANT 13: note = X can be any amino acid
  VARIANT 15: note = X can be any amino acid
  VARIANT 31: note = X can be any amino acid
  VARIANT 36: note = X can be any amino acid
  VARIANT 38: note = X can be any amino acid
MIIQXKQXCXCKXHXDIIHCISLHQTRIIHXQLTTXYXQMI

SEQ ID NO: 1167 - protein, 41 aa, synthetic construct
  VARIANT 2: note = X can be any amino acid
  VARIANT 4: note = X can be any amino acid
  VARIANT 7: note = X can be any amino acid
  VARIANT 9: note = X can be any amino acid
  VARIANT 25: note = X can be any amino acid
  VARIANT 30: note = X can be any amino acid
  VARIANT 32: note = X can be any amino acid
MXCXCKXHXDIIHCISLHQTRIIHXQLTTXYXQMINRHLII

SEQ ID NO: 1168 - protein, 41 aa, synthetic construct
  VARIANT 3: note = X can be any amino acid
  VARIANT 19: note = X can be any amino acid
  VARIANT 24: note = X can be any amino acid
  VARIANT 26: note = X can be any amino acid
MHXDIIHCISLHQTRIIHXQLTTXYXQMINRHLIIFILTQY

SEQ ID NO: 1169 - protein, 41 aa, synthetic construct
  VARIANT 8: note = X can be any amino acid
  VARIANT 24: note = X can be any amino acid
  VARIANT 26: note = X can be any amino acid
  VARIANT 29: note = X can be any amino acid
  VARIANT 34: note = X can be any amino acid
  VARIANT 37: note = X can be any amino acid
MFTQTKVXAKEILPRRSGRSTARXRXKSXPRIKXQGXTLIP

SEQ ID NO: 1170 - protein, 41 aa, synthetic construct
  VARIANT 2: note = X can be any amino acid
  VARIANT 18: note = X can be any amino acid
  VARIANT 20: note = X can be any amino acid
  VARIANT 23: note = X can be any amino acid
  VARIANT 28: note = X can be any amino acid
  VARIANT 31: note = X can be any amino acid
  VARIANT 38: note = X can be any amino acid
  VARIANT 39: note = X can be any amino acid
MXAKEILPRRSGRSTARXRXKSXPRIKXQGXTLIPSAXXIN

SEQ ID NO: 1171 - protein, 41 aa, synthetic construct
  VARIANT 12: note = X can be any amino acid
  VARIANT 14: note = X can be any amino acid
  VARIANT 17: note = X can be any amino acid
  VARIANT 22: note = X can be any amino acid
  VARIANT 25: note = X can be any amino acid
  VARIANT 32: note = X can be any amino acid
  VARIANT 33: note = X can be any amino acid
  VARIANT 36: note = X can be any amino acid
  VARIANT 38: note = X can be any amino acid
MPRRSGRSTARXRXKSXPRIKXQGXTLIPSAXXINXKXLYT

SEQ ID NO: 1172 - protein, 41 aa, synthetic construct
MARQEIKKKSSDTLKLQKKAKKVDTLGRGDIQPQLDSALQD

SEQ ID NO: 1173 - protein, 41 aa, synthetic construct
MKKSSDTLKLQKKAKKVDTLGRGDIQPQLDSALQDVNDKYL

SEQ ID NO: 1174 - protein, 41 aa, synthetic construct
MEQKRRAREKANLKNPQIMYLEQELESLKAVLEIKNEKLHQ

SEQ ID NO: 1175 - protein, 41 aa, synthetic construct
MREKANLKNPQIMYLEQELESLKAVLEIKNEKLHQQDIKLM

SEQ ID NO: 1176 - protein, 41 aa, synthetic construct
MKNPQIMYLEQELESLKAVLEIKNEKLHQQDIKLMKMEKLV

SEQ ID NO: 1177 - protein, 41 aa, synthetic construct
MPGSLPEESASPARCMIVHQGTILDNVKNLLEFAETLQFID

SEQ ID NO: 1178 - protein, 41 aa, synthetic construct
MRCMIVHQGTILDNVKNLLEFAETLQFIDSFLNTSSNHENS

SEQ ID NO: 1179 - protein, 41 aa, synthetic construct
MDQIPELENNEKAPKVVILKKATAYILSVQAEEQKLISEED

SEQ ID NO: 1180 - protein, 41 aa, synthetic construct
MENNEKAPKVVILKKATAYILSVQAEEQKLISEEDLLRKRR

SEQ ID NO: 1181 - protein, 41 aa, synthetic construct
MAPGIGPPEPWPGGCTGDEAESRGHSKGWGRNYASIIRRDC

SEQ ID NO: 1182 - protein, 41 aa, synthetic construct
MPEPWPGGCTGDEAESRGHSKGWGRNYASIIRRDCMWSGFS

SEQ ID NO: 1183 - protein, 41 aa, synthetic construct
MALRVAVRGAFVSLWFAAGAGDRERNKGDKGAQTGAGLSQE

SEQ ID NO: 1184 - protein, 41 aa, synthetic construct
MLWFAAGAGDRERNKGDKGAQTGAGLSQEAEDVDVSRARRV

SEQ ID NO: 1185 - protein, 41 aa, synthetic construct
MGFVPIPAAQDDEMFQETVEAMAIMGFSEEEQLSILKVVSS

SEQ ID NO: 1186 - protein, 41 aa, synthetic construct
MAAQDDEMFQETVEAMAIMGFSEEEQLSILKVVSSVLQLGN

SEQ ID NO: 1187 - protein, 41 aa, synthetic construct
MLRNWQWWRLFTKVKPLLQVTRQEEEMQAKEDELQKTKERQ

SEQ ID NO: 1188 - protein, 41 aa, synthetic construct
MWRLFTKVKPLLQVTRQEEEMQAKEDELQKTKERQQKAENE

SEQ ID NO: 1189 - protein, 41 aa, synthetic construct
MSQLTEEKNLLQEQLQAETELYAEAEEMRVRLAAKKQELEE

SEQ ID NO: 1190 - protein, 41 aa, synthetic construct
MKNLLQEQLQAETELYAEAEEMRVRLAAKKQELEEILHEME

SEQ ID NO: 1191 - protein, 41 aa, synthetic construct
MQLQAETELYAEAEEMRVRLAAKKQELEEILHEMEARLEEE

SEQ ID NO: 1192 - protein, 41 aa, synthetic construct
MLEVRLKKEEKSRQELEKLKRKLEGDASDFHEQIADLQAQI

SEQ ID NO: 1193 - protein, 41 aa, synthetic construct
MQELEKLKRKLEGDASDFHEQIADLQAQIAELKMQLAKKEE

SEQ ID NO: 1194 - protein, 41 aa, synthetic construct
MSERAARNKAEKQKRDLGEELEALKTELEDTLDSTATQQEL

SEQ ID NO: 1195 - protein, 41 aa, synthetic construct
MKRDLGEELEALKTELEDTLDSTATQQELRAKREQEVTVLK

SEQ ID NO: 1196 - protein, 41 aa, synthetic construct
MLNIQLSDSKKKLQDFASTVEALEEGKKRFQKEIENLTQQY

SEQ ID NO: 1197 - protein, 41 aa, synthetic construct
MDSKKKLQDFASTVEALEEGKKRFQKEIENLTQQYEEKAAA

SEQ ID NO: 1198 - protein, 41 aa, synthetic construct
MVEALEEGKKRFQKEIENLTQQYEEKAAAYDKLEKTKNRLQ

SEQ ID NO: 1199 - protein, 41 aa, synthetic construct
MEMPPHIYAITDTAYRSMMQDREDQSILCTGESGAGKTENT

SEQ ID NO: 1200 - protein, 41 aa, synthetic construct
MAYRSMMQDREDQSILCTGESGAGKTENTKKVIQYLAYVAS

SEQ ID NO: 1201 - protein, 41 aa, synthetic construct
MEPYNKYRFLSNGHVTIPGQQDKDMFQETMEAMRIMGIPEE

SEQ ID NO: 1202 - protein, 41 aa, synthetic construct
MRFLSNGHVTIPGQQDKDMFQETMEAMRIMGIPEEEQMGLL

SEQ ID NO: 1203 - protein, 41 aa, synthetic construct
MEEEEERCQHLQAEKKKMQQNIQELEEQLEEEESARQKLQL

SEQ ID NO: 1204 - protein, 41 aa, synthetic construct
MCQHLQAEKKKMQQNIQELEEQLEEEESARQKLQLEKVTTE

SEQ ID NO: 1205 - protein, 41 aa, synthetic construct
MAKHNLEKQIATLHAQVADMKKKMEDSVGCLETAEEVKRKL

SEQ ID NO: 1206 - protein, 41 aa, synthetic construct
MKQIATLHAQVADMKKKMEDSVGCLETAEEVKRKLQKDLEG

SEQ ID NO: 1207 - protein, 41 aa, synthetic construct
MHAQVADMKKKMEDSVGCLETAEEVKRKLQKDLEGLSQRHE

SEQ ID NO: 1208 - protein, 41 aa, synthetic construct
MMKKKMEDSVGCLETAEEVKRKLQKDLEGLSQRHEEKVAAY

SEQ ID NO: 1209 - protein, 41 aa, synthetic construct
MDLEGLSQRHEEKVAAYDKLEKTKTRLQQELDDLLVDLDHQ

SEQ ID NO: 1210 - protein, 41 aa, synthetic construct
MDGEDFQSCLICIARRLPRPPAITGVESFMTKQDTTGKIIS

SEQ ID NO: 1211 - protein, 41 aa, synthetic construct
MSCLICIARRLPRPPAITGVESFMTKQDTTGKIISIDTSSL

SEQ ID NO: 1212 - protein, 41 aa, synthetic construct
MARRLPRPPAITGVESFMTKQDTTGKIISIDTSSLRAAGRT

SEQ ID NO: 1213 - protein, 41 aa, synthetic construct
MSRLNIQPAKAESKDNKEIASILNEMIQSDNSSSDGKPLDS

SEQ ID NO: 1214 - protein, 41 aa, synthetic construct
MKDNKEIASILNEMIQSDNSSSDGKPLDSGLLHNNDRLSDG

SEQ ID NO: 1215 - protein, 41 aa, synthetic construct
MASILNEMIQSDNSSSDGKPLDSGLLHNNDRLSDGDSKYSQ

SEQ ID NO: 1216 - protein, 41 aa, synthetic construct
MPCTSFAECVCDENCEKEALYKWLLKKEGKDKNGMPVEPKP

SEQ ID NO: 1217 - protein, 41 aa, synthetic construct
MLYKWLLKKEGKDKNGMPVEPKPEPEKHKDSLNMWLCPRKE

SEQ ID NO: 1218 - protein, 41 aa, synthetic construct
MKKEGKDKNGMPVEPKPEPEKHKDSLNMWLCPRKEVIEQTK

SEQ ID NO: 1219 - protein, 41 aa, synthetic construct
MIVQIIYDENRKKAEEAHKIFEGLGPKVELPLYNQPSDTKV

SEQ ID NO: 1220 - protein, 41 aa, synthetic construct
MDENRKKAEEAHKIFEGLGPKVELPLYNQPSDTKVYHENIK

SEQ ID NO: 1221 - protein, 41 aa, synthetic construct
MAEEAHKIFEGLGPKVELPLYNQPSDTKVYHENIKTNQVMR

SEQ ID NO: 1222 - protein, 41 aa, synthetic construct
MLQQHKQKTSRKPREERDVSQCESVASTVSAQEDEDIEASN

SEQ ID NO: 1223 - protein, 41 aa, synthetic construct
MKTSRKPREERDVSQCESVASTVSAQEDEDIEASNEEENPE

SEQ ID NO: 1224 - protein, 41 aa, synthetic construct
MENIKVVERGKYEDVKAGETVRSRHTSVVSSGPSVLRSTLH

SEQ ID NO: 1225 - protein, 41 aa, synthetic construct
MERGKYEDVKAGETVRSRHTSVVSSGPSVLRSTLHEAPKAQ

SEQ ID NO: 1226 - protein, 41 aa, synthetic construct
MDVKAGETVRSRHTSVVSSGPSVLRSTLHEAPKAQLSPGIY

SEQ ID NO: 1227 - protein, 41 aa, synthetic construct
MPPRPYNSASMSPGHPTHLAAAASAEREREREREKERERER

SEQ ID NO: 1228 - protein, 41 aa, synthetic construct
MGHPTHLAAAASAEREREREREKERERERIAAASSDLYLRP

SEQ ID NO: 1229 - protein, 41 aa, synthetic construct
MEREREREREKERERERIAAASSDLYLRPGSEQPGRPGSHG

SEQ ID NO: 1230 - protein, 41 aa, synthetic construct
MDDKVEDHGVVMSQPMGVVPGTANTSVVTSGETRREEGDPS

SEQ ID NO: 1231 - protein, 41 aa, synthetic construct
MPGTANTSVVTSGETRREEGDPSPHSGGVCKPKLISKSNSR

SEQ ID NO: 1232 - protein, 41 aa, synthetic construct
METRREEGDPSPHSGGVCKPKLISKSNSRKSKSPIPGQGYL

SEQ ID NO: 1233 - protein, 41 aa, synthetic construct
MLSSLDLKEPSNKRVRPLARVTSLANLISPVRNGAVRRFGQ

SEQ ID NO: 1234 - protein, 41 aa, synthetic construct
MKEPSNKRVRPLARVTSLANLISPVRNGAVRRFGQTIQSFT

SEQ ID NO: 1235 - protein, 41 aa, synthetic construct
MEDNVDVHDIELLQYINVDCAKLKRLLKETAFKFKALKKVA

SEQ ID NO: 1236 - protein, 41 aa, synthetic construct
MHDIELLQYINVDCAKLKRLLKETAFKFKALKKVAQLAVIN

SEQ ID NO: 1237 - protein, 41 aa, synthetic construct
MCAKLKRLLKETAFKFKALKKVAQLAVINSLEKAFWNWVEN

SEQ ID NO: 1238 - protein, 41 aa, synthetic construct
MVDGFAESTKRKAAVWPLQIILLILCPEIIQDISKDVVDEN

SEQ ID NO: 1239 - protein, 41 aa, synthetic construct
MSTKRKAAVWPLQIILLILCPEIIQDISKDVVDENNMNKKL

SEQ ID NO: 1240 - protein, 41 aa, synthetic construct
MAVWPLQIILLILCPEIIQDISKDVVDENNMNKKLFLDSLR

SEQ ID NO: 1241 - protein, 41 aa, synthetic construct
MDISKDVVDENNMNKKLFLDSLRKALAGHGGSRQLTESAAI

SEQ ID NO: 1242 - protein, 41 aa, synthetic construct
MQASIETMMLNLVRYVRVLGNMVHAIQIKTKLCQLVEVMMA

SEQ ID NO: 1243 - protein, 41 aa, synthetic construct
MRYVRVLGNMVHAIQIKTKLCQLVEVMMARRDDLSFCQEMK

SEQ ID NO: 1244 - protein, 41 aa, synthetic construct
MLGPPEHKPVADTHWSSLNLTSSKFEEFMTRHQVHEKEEFK

SEQ ID NO: 1245 - protein, 41 aa, synthetic construct
MKPVADTHWSSLNLTSSKFEEFMTRHQVHEKEEFKALKTLS

SEQ ID NO: 1246 - protein, 41 aa, synthetic construct
MHWSSLNLTSSKFEEFMTRHQVHEKEEFKALKTLSIFYQAG

SEQ ID NO: 1247 - protein, 41 aa, synthetic construct
MLTSSKFEEFMTRHQVHEKEEFKALKTLSIFYQAGTSKAGN

SEQ ID NO: 1248 - protein, 41 aa, synthetic construct
MKAGNPIFYYVARRFKTGQINGDLLIYHVLLTLKPYYAKPY

SEQ ID NO: 1249 - protein, 41 aa, synthetic construct
MFYYVARRFKTGQINGDLLIYHVLLTLKPYYAKPYEIVVDL

SEQ ID NO: 1250 - protein, 41 aa, synthetic construct
MVVDLTHTGPSNRFKTDFLSKWFVVFPGFAYDNVSAVYIYN

SEQ ID NO: 1251 - protein, 41 aa, synthetic construct
MTGPSNRFKTDFLSKWFVVFPGFAYDNVSAVYIYNCNSWVR

SEQ ID NO: 1252 - protein, 41 aa, synthetic construct
MFKTDFLSKWFVVFPGFAYDNVSAVYIYNCNSWVREYTKYH

SEQ ID NO: 1253 - protein, 41 aa, synthetic construct
MEMQRIKATAIRTEEEKRLMEQKVLEAEVLALKMAEESERR

SEQ ID NO: 1254 - protein, 41 aa, synthetic construct
MATAIRTEEEKRLMEQKVLEAEVLALKMAEESERRAKEADQ

SEQ ID NO: 1255 - protein, 41 aa, synthetic construct
MPPPGLPSQQDMDLIDILWRQDIDLGVSREVFDFSQRRKEY

SEQ ID NO: 1256 - protein, 41 aa, synthetic construct
MSQQDMDLIDILWRQDIDLGVSREVFDFSQRRKEYELEKQK

SEQ ID NO: 1257 - protein, 41 aa, synthetic construct
MLIDILWRQDIDLGVSREVFDFSQRRKEYELEKQKKLEKER

SEQ ID NO: 1258 - protein, 41 aa, synthetic construct
MRQDIDLGVSREVFDFSQRRKEYELEKQKKLEKERQEQLQK

SEQ ID NO: 1259 - protein, 41 aa, synthetic construct
MLVGKQCSELGICAVSVGPKDMTAQFNNLGVLHVTKKNMMG

SEQ ID NO: 1260 - protein, 41 aa, synthetic construct
MSELGICAVSVGPKDMTAQFNNLGVLHVTKKNMMGTMIQKL

SEQ ID NO: 1261 - protein, 41 aa, synthetic construct
MAVSVGPKDMTAQFNNLGVLHVTKKNMMGTMIQKLQRQRLR

SEQ ID NO: 1262 - protein, 41 aa, synthetic construct
MVITGQTSVVSFLLRVGADPALLDRHGDSAMHLALRAGAGA

SEQ ID NO: 1263 - protein, 41 aa, synthetic construct
MSVVSFLLRVGADPALLDRHGDSAMHLALRAGAGAPELLRA

SEQ ID NO: 1264 - protein, 41 aa, synthetic construct
MKLERKHRHESGDSRERPSSGEQKSRPDSPRVKQGDSNKSR

SEQ ID NO: 1265 - protein, 41 aa, synthetic construct
MRHESGDSRERPSSGEQKSRPDSPRVKQGDSNKSRSDKLGF

SEQ ID NO: 1266 - protein, 41 aa, synthetic construct
MSRERPSSGEQKSRPDSPRVKQGDSNKSRSDKLGFKSPTSK

SEQ ID NO: 1267 - protein, 41 aa, synthetic construct
MRSGALKNFVIPKIKRDKDGNVTQETKKMEMKGEPKDKVEK

SEQ ID NO: 1268 - protein, 41 aa, synthetic construct
MNFVIPKIKRDKDGNVTQETKKMEMKGEPKDKVEKIGLVED

SEQ ID NO: 1269 - protein, 41 aa, synthetic construct
MDNDSDEAFESSRKRHKKDDDKAWEYEERDRRSSGDHRRSG

SEQ ID NO: 1270 - protein, 41 aa, synthetic construct
MAFESSRKRHKKDDDKAWEYEERDRRSSGDHRRSGHSHEGR

SEQ ID NO: 1271 - protein, 41 aa, synthetic construct
MKRHKKDDDKAWEYEERDRRSSGDHRRSGHSHEGRRSSGGG

SEQ ID NO: 1272 - protein, 41 aa, synthetic construct
MDDKAWEYEERDRRSSGDHRRSGHSHEGRRSSGGGRYRNRS

SEQ ID NO: 1273 - protein, 41 aa, synthetic construct
MENILDNLEDMDFTAFGDDDEIPQELLLGKHQLNELGSESA

SEQ ID NO: 1274 - protein, 41 aa, synthetic construct
MLEDMDFTAFGDDDEIPQELLLGKHQLNELGSESAKIKAMG

SEQ ID NO: 1275 - protein, 41 aa, synthetic construct
MPQLAEQYYDMLIERILDTGISVRKRVIKILRDICIEQPTF

SEQ ID NO: 1276 - protein, 41 aa, synthetic construct
MYYDMLIERILDTGISVRKRVIKILRDICIEQPTFPKITEM

SEQ ID NO: 1277 - protein, 41 aa, synthetic construct
MVSQGILLLLMLKQHLKNLCGFSDSKIQKYSPSESAKVYDK

SEQ ID NO: 1278 - protein, 41 aa, synthetic construct
MQHLKNLCGFSDSKIQKYSPSESAKVYDKAINRKTGVHFHP

SEQ ID NO: 1279 - protein, 41 aa, synthetic construct
MKRSIVKQYLDFKLLMEHLDPDEEEEEGEVSASTNARNKAI

SEQ ID NO: 1280 - protein, 41 aa, synthetic construct
MNCEENIDDCPGNNCKNGGACVDGVNTYNCRCPPEWTGQYC

SEQ ID NO: 1281 - protein, 41 aa, synthetic construct
MNCKNGGACVDGVNTYNCRCPPEWTGQYCTEDVDECQLMPN

SEQ ID NO: 1282 - protein, 41 aa, synthetic construct
MACVDGVNTYNCRCPPEWTGQYCTEDVDECQLMPNACQNGG

SEQ ID NO: 1283 - protein, 41 aa, synthetic construct
MNTYNCRCPPEWTGQYCTEDVDECQLMPNACQNGGTCHNTH

SEQ ID NO: 1284 - protein, 41 aa, synthetic construct
MVSNPCQNDATCLDQIGEFQCICMPGYEGVHCEVNTDECAS

SEQ ID NO: 1285 - protein, 41 aa, synthetic construct
MDQIGEFQCICMPGYEGVHCEVNTDECASSPCLHNGRCLDK

SEQ ID NO: 1286 - protein, 41 aa, synthetic construct
MGTFCEEDINECASDPCRNGANCTDCVDSYTCTCPAGFSGI

SEQ ID NO: 1287 - protein, 41 aa, synthetic construct
MSDPCRNGANCTDCVDSYTCTCPAGFSGIHCENNTPDCTES

SEQ ID NO: 1288 - protein, 41 aa, synthetic construct
MLCSPNGYLGSLKPGVQGKKVRKPSSKGLACGSKEAKDLKA

SEQ ID NO: 1289 - protein, 41 aa, synthetic construct
MYLGSLKPGVQGKKVRKPSSKGLACGSKEAKDLKARRKKSQ

SEQ ID NO: 1290 - protein, 41 aa, synthetic construct
MKVRKPSSKGLACGSKEAKDLKARRKKSQDGKGCLLDSSGM

SEQ ID NO: 1291 - protein, 41 aa, synthetic construct
MYSTSHPCFVSRPCLNGGTCHMLSRDTYECTCQVGFTGKEC

SEQ ID NO: 1292 - protein, 41 aa, synthetic construct
MCFVSRPCLNGGTCHMLSRDTYECTCQVGFTGKECQWTDAC

SEQ ID NO: 1293 - protein, 41 aa, synthetic construct
MCHMLSRDTYECTCQVGFTGKECQWTDACLSHPCANGSTCT

SEQ ID NO: 1294 - protein, 41 aa, synthetic construct
MDTYECTCQVGFTGKECQWTDACLSHPCANGSTCTTVANQF

SEQ ID NO: 1295 - protein, 41 aa, synthetic construct
MEEQLDECASNPCQHGATCSDFIGGYRCECVPGYQGVNCEY

SEQ ID NO: 1296 - protein, 41 aa, synthetic construct
MCASNPCQHGATCSDFIGGYRCECVPGYQGVNCEYEVDECQ

SEQ ID NO: 1297 - protein, 41 aa, synthetic construct
MQHGATCSDFIGGYRCECVPGYQGVNCEYEVDECQNQPCQN

SEQ ID NO: 1298 - protein, 41 aa, synthetic construct
MNCEYEVDECQNQPCQNGGTCIDLVNHFKCSCPPGTRGMKS

SEQ ID NO: 1299 - protein, 41 aa, synthetic construct
MEDSYRKQVVIDGETCLLDILDTAGQEEYSAMRDQYMRTGE

SEQ ID NO: 1300 - protein, 41 aa, synthetic construct
METCLLDILDTAGQEEYSAMRDQYMRTGEGFLCVFAINNSK

SEQ ID NO: 1301 - protein, 41 aa, synthetic construct
MPLKYEVGDLIWAKFKRRPWWPCRICSDPLINTHSKMKVSN

SEQ ID NO: 1302 - protein, 41 aa, synthetic construct
MGDLIWAKFKRRPWWPCRICSDPLINTHSKMKVSNRRPYRQ

SEQ ID NO: 1303 - protein, 41 aa, synthetic construct
MKFKRRPWWPCRICSDPLINTHSKMKVSNRRPYRQYYVEAF

SEQ ID NO: 1304 - protein, 41 aa, synthetic construct
MGYRHKVPQKILSKWEASVGLAEQYDVPKGSKNRKCIPGSI

SEQ ID NO: 1305 - protein, 41 aa, synthetic construct
MPQKILSKWEASVGLAEQYDVPKGSKNRKCIPGSIKLDSEE

SEQ ID NO: 1306 - protein, 41 aa, synthetic construct
MKPCAKSRARKSSDNPKRTSVKKGHIQFEAHKDERRGKIPE

SEQ ID NO: 1307 - protein, 41 aa, synthetic construct
MRARKSSDNPKRTSVKKGHIQFEAHKDERRGKIPENLGLNF

SEQ ID NO: 1308 - protein, 41 aa, synthetic construct
MDNPKRTSVKKGHIQFEAHKDERRGKIPENLGLNFISGDIS

SEQ ID NO: 1309 - protein, 41 aa, synthetic construct
MSVKKGHIQFEAHKDERRGKIPENLGLNFISGDISDTQASN

SEQ ID NO: 1310 - protein, 41 aa, synthetic construct
MHDSKTKEQRLMTAQNLVSYRSPGRGDCSTNSPVGVSKVLV

SEQ ID NO: 1311 - protein, 41 aa, synthetic construct
MMVKNTVNRKALKTERKRKLNQLPSVTLDAVLQGDRERGGS

SEQ ID NO: 1312 - protein, 41 aa, synthetic construct
MNRKALKTERKRKLNQLPSVTLDAVLQGDRERGGSLRGGAE

SEQ ID NO: 1313 - protein, 41 aa, synthetic construct
MKQHREGMLFISKLDGRLSCTEHDPCGPNPLEPGEIREYVP

SEQ ID NO: 1314 - protein, 41 aa, synthetic construct
MCTEHDPCGPNPLEPGEIREYVPPPVPLPPGPSTHLAEQST

SEQ ID NO: 1315 - protein, 41 aa, synthetic construct
MKGQKKSARQYHVQFFGDAPERAWIFEKSLVAFEGEGQFEK

SEQ ID NO: 1316 - protein, 41 aa, synthetic construct
MARQYHVQFFGDAPERAWIFEKSLVAFEGEGQFEKLCQESA

SEQ ID NO: 1317 - protein, 41 aa, synthetic construct
MVFESRGFRCPLHSCVSCHASNPSNPRPSKGKMMRCVRCPV

SEQ ID NO: 1318 - protein, 41 aa, synthetic construct
MPRPSKGKMMRCVRCPVAYHSGDACLAAGCSVIASNSIICT

SEQ ID NO: 1319 - protein, 41 aa, synthetic construct
MGRVFKNALQEAEARFREIKLQREARETQESERKPPPYKHI

SEQ ID NO: 1320 - protein, 41 aa, synthetic construct
MALQEAEARFREIKLQREARETQESERKPPPYKHIKVNKPY

SEQ ID NO: 1321 - protein, 41 aa, synthetic construct
MRIKHAHENDITHFYMLTIDKDRIIDAGPKGNYSRFMNHSC

SEQ ID NO: 1322 - protein, 41 aa, synthetic construct
MFYMLTIDKDRIIDAGPKGNYSRFMNHSCQPNCETLKWTVN

SEQ ID NO: 1323 - protein, 41 aa, synthetic construct
MPKKKIKKEQVETVPQATVKTGLQKGASEISDSCKPLKKRS

SEQ ID NO: 1324 - protein, 41 aa, synthetic construct
MKEQVETVPQATVKTGLQKGASEISDSCKPLKKRSRASTDV

SEQ ID NO: 1325 - protein, 41 aa, synthetic construct
MGASEISDSCKPLKKRSRASTDVEMTSSAYRDTSDSDSRGL

SEQ ID NO: 1326 - protein, 41 aa, synthetic construct
MEGDKSFAEGQTSINKTFKKALEEAAKRFQELKAQRESKEA

SEQ ID NO: 1327 - protein, 41 aa, synthetic construct
MAEGQTSINKTFKKALEEAAKRFQELKAQRESKEALEIEKN

SEQ ID NO: 1328 - protein, 41 aa, synthetic construct
MINKTFKKALEEAAKRFQELKAQRESKEALEIEKNSRKPPP

SEQ ID NO: 1329 - protein, 41 aa, synthetic construct
MAEIIKTERRGWGLRTKRSIKKGEFVNEYVGELIDEEECRL

SEQ ID NO: 1330 - protein, 41 aa, synthetic construct
MIKKGEFVNEYVGELIDEEECRLRIKRAHENSVTNFYMLTV

SEQ ID NO: 1331 - protein, 41 aa, synthetic construct
MGDFGMSRDIYSTDYYRVGGRTMLPIRWMPPESILYRKFTT

SEQ ID NO: 1332 - protein, 41 aa, synthetic construct
MDVWSFGVVLWEIFTYGKQPWYQLSNTEAIDCITQGRELER

SEQ ID NO: 1333 - protein, 41 aa, synthetic construct
MVCSTGTGKFSLPQEKIVFNAQGDSVLGAGACGGVPIIFSR

SEQ ID NO: 1334 - protein, 41 aa, synthetic construct
MGKFSLPQEKIVFNAQGDSVLGAGACGGVPIIFSRNSGLVS

SEQ ID NO: 1335 - protein, 41 aa, synthetic construct
MNKREYEIPSNLTPADVFFREVSQVDTICECLLEHEEQVLR

SEQ ID NO: 1336 - protein, 41 aa, synthetic construct
MREVSQVDTICECLLEHEEQVLRDAPMDSIEWAEVVINVNN

SEQ ID NO: 1337 - protein, 41 aa, synthetic construct
MPRITPPAAKPGSPQAKSLQPAVAEKQGHQWKDSDPVMAGI

SEQ ID NO: 1338 - protein, 41 aa, synthetic construct
MAAKPGSPQAKSLQPAVAEKQGHQWKDSDPVMAGIGEEIAH

SEQ ID NO: 1339 - protein, 41 aa, synthetic construct
MACFQVGTSEEMKMLRTESDDLHTFLLEIKETTESLHGDIS

SEQ ID NO: 1340 - protein, 41 aa, synthetic construct
MTSEEMKMLRTESDDLHTFLLEIKETTESLHGDISSLKTTL

SEQ ID NO: 1341 - protein, 41 aa, synthetic construct
MLLLDLITFFDEYHSGHIDRAFDIIERLKLVPLNQESVEER

SEQ ID NO: 1342 - protein, 41 aa, synthetic construct
MTFFDEYHSGHIDRAFDIIERLKLVPLNQESVEERVAAFRN

SEQ ID NO: 1343 - protein, 41 aa, synthetic construct
MGLLKSPSAAAAAPLGGGGGGSGASGGFQHWGGMPCPCSMC

SEQ ID NO: 1344 - protein, 41 aa, synthetic construct
MSAAAAAPLGGGGGGSGASGGFQHWGGMPCPCSMCQVPPPH

SEQ ID NO: 1345 - protein, 41 aa, synthetic construct
MWMAPEVVTRKAYGPKVDIWSLGIMAIEMVEGEPPYLNENP

SEQ ID NO: 1346 - protein, 41 aa, synthetic construct
MVTRKAYGPKVDIWSLGIMAIEMVEGEPPYLNENPLRALYL

SEQ ID NO: 1347 - protein, 41 aa, synthetic construct
MPLLPTSSLSIVNRSKEEVTSHKYQHEKLFIQVKGKKSRHQ

SEQ ID NO: 1348 - protein, 41 aa, synthetic construct
MSLSIVNRSKEEVTSHKYQHEKLFIQVKGKKSRHQKEDSLS

SEQ ID NO: 1349 - protein, 41 aa, synthetic construct
MPVQCSRDVVICPDASLEDAKKEGPYDVVVLPGGNLGAQNL

SEQ ID NO: 1350 - protein, 41 aa, synthetic construct
MDASLEDAKKEGPYDVVVLPGGNLGAQNLSESAAVKEILKE

SEQ ID NO: 1351 - protein, 41 aa, synthetic construct
MAKKEGPYDVVVLPGGNLGAQNLSESAAVKEILKEQENRKG

SEQ ID NO: 1352 - protein, 41 aa, synthetic construct
MASCGPSGCYTYQVSRHSTEMLHNLNQQRKNGGRFCDVLLR

SEQ ID NO: 1353 - protein, 41 aa, synthetic construct
MGCYTYQVSRHSTEMLHNLNQQRKNGGRFCDVLLRVGDESF

SEQ ID NO: 1354 - protein, 41 aa, synthetic construct
MQHGVTSLQLGYIDLPPPRLGENGLPISEDPDGPRKRSRTR

SEQ ID NO: 1355 - protein, 41 aa, synthetic construct
MLQLGYIDLPPPRLGENGLPISEDPDGPRKRSRTRKQVACE

SEQ ID NO: 1356 - protein, 41 aa, synthetic construct
MPAVDPNFPNKPPLTFDIIRKNVENNRYRRLDLFQEHMFEV

SEQ ID NO: 1357 - protein, 41 aa, synthetic construct
MLTFDIIRKNVENNRYRRLDLFQEHMFEVLERARRMNRTDS

SEQ ID NO: 1358 - protein, 41 aa, synthetic construct
MHLATRKFLEKEVFKSDYYNKVPVSKILGKCVVMFVKEYFK

SEQ ID NO: 1359 - protein, 41 aa, synthetic construct
MVVMFVKEYFKLCPENFRDEDVFVCESRYSAKTKSFKKIKL

SEQ ID NO: 1360 - protein, 41 aa, synthetic construct
MEYFKLCPENFRDEDVFVCESRYSAKTKSFKKIKLWTMPIS

SEQ ID NO: 1361 - protein, 41 aa, synthetic construct
MEKGGGSAAAAAAAAASGGAGSDNSVEHSDYRAKLSQIRQI

SEQ ID NO: 1362 - protein, 41 aa, synthetic construct
MAAAAAAAAASGGAGSDNSVEHSDYRAKLSQIRQIYHTELE

SEQ ID NO: 1363 - protein, 41 aa, synthetic construct
MRAKLSQIRQIYHTELEKYEQACNEFTTHVMNLLREQSRTR

SEQ ID NO: 1364 - protein, 41 aa, synthetic construct
MCQVSEEDGRGEPAMESSQIVSRLVQIRDYITKASSMREDL

SEQ ID NO: 1365 - protein, 41 aa, synthetic construct
MDGRGEPAMESSQIVSRLVQIRDYITKASSMREDLVEKNER

SEQ ID NO: 1366 - protein, 41 aa, synthetic construct
MHDLLKRMLQQQEQLRALQGRQAALLALQHKAEQAIAVMDD

SEQ ID NO: 1367 - protein, 41 aa, synthetic construct
MGRQAALLALQHKAEQAIAVMDDSVVAETAGSLSGVSITSE

SEQ ID NO: 1368 - protein, 41 aa, synthetic construct
MNANFLVWPPCVEVQRCSGCCNNRNVQCRPTQVQLRPVQVR

SEQ ID NO: 1369 - protein, 41 aa, synthetic construct
MQVQLRPVQVRKIEIVRKKPIFKKATVTLEDHLACKCETVA

SEQ ID NO: 1370 - protein, 41 aa, synthetic construct
MEIVRKKPIFKKATVTLEDHLACKCETVAAARPVTRSPGGS

SEQ ID NO: 1371 - protein, 41 aa, synthetic construct
MNVVFFPRCLLVQRCGGNCGCGTVNWRSCTCNSGKTVKKYH

SEQ ID NO: 1372 - protein, 41 aa, synthetic construct
MGCGTVNWRSCTCNSGKTVKKYHEVLQFEPGHIKRRGRAKT

SEQ ID NO: 1373 - protein, 41 aa, synthetic construct
MNSGKTVKKYHEVLQFEPGHIKRRGRAKTMALVDIQLDHHE

SEQ ID NO: 1374 - protein, 41 aa, synthetic construct
MPVGLPLPSHVSLTGESDGGYMDMSKDESVDYVPMLDMKGD

SEQ ID NO: 1375 - protein, 41 aa, synthetic construct
MPSHVSLTGESDGGYMDMSKDESVDYVPMLDMKGDVKYADI

SEQ ID NO: 1376 - protein, 41 aa, synthetic construct
MSAPERTCRATLINESPVLSYMDLVGFSYQVANGMEFLASK

SEQ ID NO: 1377 - protein, 41 aa, synthetic construct
MSYMDLVGFSYQVANGMEFLASKNCVHRDLAARNVLICEGK

SEQ ID NO: 1378 - protein, 41 aa, synthetic construct
MEHVFDLILELYNIDSHLLLSVLPQLEFKLKSNDNEERLQV

SEQ ID NO: 1379 - protein, 41 aa, synthetic construct
MILELYNIDSHLLLSVLPQLEFKLKSNDNEERLQVVKLLAK

SEQ ID NO: 1380 - protein, 41 aa, synthetic construct
MLSVLPQLEFKLKSNDNEERLQVVKLLAKMFGAKDSELASQ

SEQ ID NO: 1381 - protein, 41 aa, synthetic construct
MLEFKLKSNDNEERLQVVKLLAKMFGAKDSELASQNKPLWQ

SEQ ID NO: 1382 - protein, 41 aa, synthetic construct
METTERMKCLYYLYATLDLNAVKYVSNIKFCSFHPLQYIGF

SEQ ID NO: 1383 - protein, 41 aa, synthetic construct
MKCLYYLYATLDLNAVKYVSNIKFCSFHPLQYIGFYGKETT

SEQ ID NO: 1384 - protein, 41 aa, synthetic construct
MYATLDLNAVKYVSNIKFCSFHPLQYIGFYGKETTNTCILK

SEQ ID NO: 1385 - protein, 41 aa, synthetic construct
MNAVKYVSNIKFCSFHPLQYIGFYGKETTNTCILKCNLCSV

SEQ ID NO: 1386 - protein, 41 aa, synthetic construct
MNDCIVDKIRRKNCPACRLRKCCQAGMVLGGRKFKKFNKVR

SEQ ID NO: 1387 - protein, 41 aa, synthetic construct
MKIRRKNCPACRLRKCCQAGMVLGGRKFKKFNKVRVVRALD

SEQ ID NO: 1388 - protein, 41 aa, synthetic construct
MIQYSWMSLMVFGLGWRSYKHVSGQMLYFAPDLILNEQRMK

SEQ ID NO: 1389 - protein, 41 aa, synthetic construct
MSLMVFGLGWRSYKHVSGQMLYFAPDLILNEQRMKESSFYS

SEQ ID NO: 1390 - protein, 41 aa, synthetic construct
MQVAQQEAERARFVVEKAEQQKKAAIISAEGDSKAAELIAN

SEQ ID NO: 1391 - protein, 41 aa, synthetic construct
MAERARFVVEKAEQQKKAAIISAEGDSKAAELIANSLATAG

SEQ ID NO: 1392 - protein, 41 aa, synthetic construct
MLDICGYFLKALYASSNELVQLDVYPVPNYLSYMDVSRNRL

SEQ ID NO: 1393 - protein, 41 aa, synthetic construct
MASSNELVQLDVYPVPNYLSYMDVSRNRLENVPEWVCESRK

SEQ ID NO: 1394 - protein, 41 aa, synthetic construct
MVQLDVYPVPNYLSYMDVSRNRLENVPEWVCESRKLEVLDI

SEQ ID NO: 1395 - protein, 41 aa, synthetic construct
MAASRATTLSNAVSSLASTGLSLTKVDEREKQAALEEEQAR

SEQ ID NO: 1396 - protein, 41 aa, synthetic construct
MVDEREKQAALEEEQARLKALKEQRLKELAKKPHTSLTTAA

SEQ ID NO: 1397 - protein, 41 aa, synthetic construct
MLKELAKKPHTSLTTAASPVSTSAGGIMTAPAIDIFSTPSS

SEQ ID NO: 1398 - protein, 41 aa, synthetic construct
MPPSKLVSDDLDSSLANLVGNLGIGNGTTKNDVNWSQPGEK

SEQ ID NO: 1399 - protein, 41 aa, synthetic construct
MSDDLDSSLANLVGNLGIGNGTTKNDVNWSQPGEKKLTGGS

SEQ ID NO: 1400 - protein, 41 aa, synthetic construct
MPFLKVIEPVGNREEKILNREIGFAIGMPVCEFDMVKDPEV

SEQ ID NO: 1401 - protein, 41 aa, synthetic construct
MEPVGNREEKILNREIGFAIGMPVCEFDMVKDPEVQDFRRN

SEQ ID NO: 1402 - protein, 41 aa, synthetic construct
MPNVESSPELPKHIYNKLDKGQIIVVIWVIVSPNNDKQKYT

SEQ ID NO: 1403 - protein, 41 aa, synthetic construct
MPELPKHIYNKLDKGQIIVVIWVIVSPNNDKQKYTLKINHD

SEQ ID NO: 1404 - protein, 41 aa, synthetic construct
MIYNKLDKGQIIVVIWVIVSPNNDKQKYTLKINHDCVPEQV

SEQ ID NO: 1405 - protein, 41 aa, synthetic construct
MKGQIIVVIWVIVSPNNDKQKYTLKINHDCVPEQVIAEAIR

SEQ ID NO: 1406 - protein, 41 aa, synthetic construct
MEAIRKKTRSMLLSSEQLKLCVLEYQGKYILKVCGCDEYFL

SEQ ID NO: 1407 - protein, 41 aa, synthetic construct
MQGKYILKVCGCDEYFLEKYPLSQYKYIRSCIMLGRMPNLM

SEQ ID NO: 1408 - protein, 41 aa, synthetic construct
MLFINLFSMMLGSGMPELQSFDDIAYIRKTLALDKTEQEAL

SEQ ID NO: 1409 - protein, 41 aa, synthetic construct
MSMMLGSGMPELQSFDDIAYIRKTLALDKTEQEALEYFMKQ

SEQ ID NO: 1410 - protein, 41 aa, synthetic construct
MIILHSWSSFPDELEEMLNPMGTVQTNPYTENATALHVKFP

SEQ ID NO: 1411 - protein, 41 aa, synthetic construct
MSSFPDELEEMLNPMGTVQTNPYTENATALHVKFPENKKQP

SEQ ID NO: 1412 - protein, 41 aa, synthetic construct
MGCLRQMSDEELSQYLLQLVQVLKYEPFLDCALSRFLLERA

SEQ ID NO: 1413 - protein, 41 aa, synthetic construct
MQYLLQLVQVLKYEPFLDCALSRFLLERALGNRRIGQFLFW

SEQ ID NO: 1414 - protein, 41 aa, synthetic construct
MLILRRHGNLFITLFALMLTAGLPELTSVKDIQYLKDSLAL

SEQ ID NO: 1415 - protein, 41 aa, synthetic construct
MFQDICVKAYLALRHHTNLLIILFSMMLMTGMPQLTSKEDI

SEQ ID NO: 1416 - protein, 41 aa, synthetic construct
MTQVERKRGKKINKEATGKDVESYLQPKAKRHTEGKPERAE

SEQ ID NO: 1417 - protein, 41 aa, synthetic construct
MRGKKINKEATGKDVESYLQPKAKRHTEGKPERAEAQERVA

SEQ ID NO: 1418 - protein, 41 aa, synthetic construct
MCEHCDRRFYTRKDVRRHMVVHTGRKDFLCQYCAQRFGRKD

SEQ ID NO: 1419 - protein, 41 aa, synthetic construct
MRFYTRKDVRRHMVVHTGRKDFLCQYCAQRFGRKDHLTRHM

SEQ ID NO: 1420 - protein, 41 aa, synthetic construct
MITRTFASGKTEKVIFQALKELGLPSGKNDEIEPTAFSYEK

SEQ ID NO: 1421 - protein, 41 aa, synthetic construct
MSGKTEKVIFQALKELGLPSGKNDEIEPTAFSYEKFYELTQ

SEQ ID NO: 1422 - protein, 41 aa, synthetic construct
MCPRTDIEDLFKKINGDKTDYLTVDQLVSFLNEHQRDPRLN

SEQ ID NO: 1423 - protein, 41 aa, synthetic construct
MEDLFKKINGDKTDYLTVDQLVSFLNEHQRDPRLNEILFPF

SEQ ID NO: 1424 - protein, 41 aa, synthetic construct
MLASGVEAKKGIELIPQVRIEDLKQMKAYLKHLKKQQKELN

SEQ ID NO: 1425 - protein, 41 aa, synthetic construct
MAKKGIELIPQVRIEDLKQMKAYLKHLKKQQKELNSLKKKH

SEQ ID NO: 1426 - protein, 41 aa, synthetic construct
MLIPQVRIEDLKQMKAYLKHLKKQQKELNSLKKKHAKEHST

SEQ ID NO: 1427 - protein, 41 aa, synthetic construct
MTFIKSAIIQNVEKQEGGWWRGDYGGKKQLWFPSNYVEEMV

SEQ ID NO: 1428 - protein, 41 aa, synthetic construct
MIIQNVEKQEGGWWRGDYGGKKQLWFPSNYVEEMVNPVALE

SEQ ID NO: 1429 - protein, 41 aa, synthetic construct
MLHRILHHKHVVQFYHYFEDKENIYILLEYCSRRSMAHILK

SEQ ID NO: 1430 - protein, 41 aa, synthetic construct
MHKHVVQFYHYFEDKENIYILLEYCSRRSMAHILKARKVLT

SEQ ID NO: 1431 - protein, 41 aa, synthetic construct
MFYHYFEDKENIYILLEYCSRRSMAHILKARKVLTEPEVRY

SEQ ID NO: 1432 - protein, 41 aa, synthetic construct
MRPPFETTNLKETYRCIREARYTMPSSLLAPAKHLIASMLS

SEQ ID NO: 1433 - protein, 41 aa, synthetic construct
MTNLKETYRCIREARYTMPSSLLAPAKHLIASMLSKNPEDR

SEQ ID NO: 1434 - protein, 41 aa, synthetic construct
MPAVENKQQIGDAIRMIVRGTLGSCSSSSECLEDSTMGSVA

SEQ ID NO: 1435 - protein, 41 aa, synthetic construct
MIRMIVRGTLGSCSSSSECLEDSTMGSVADTVARVLRGCLE

SEQ ID NO: 1436 - protein, 41 aa, synthetic construct
MPEDSQQDLPGERHALLEEENRVWHLVRPTDEVDEGKSKRG

SEQ ID NO: 1437 - protein, 41 aa, synthetic construct
MDLPGERHALLEEENRVWHLVRPTDEVDEGKSKRGSVKEKE

SEQ ID NO: 1438 - protein, 41 aa, synthetic construct
MQTFMDACTRTEHKLSRDSPSNKLLYAKEISTYKKMVEDYY

SEQ ID NO: 1439 - protein, 41 aa, synthetic construct
MKLSRDSPSNKLLYAKEISTYKKMVEDYYKGIRQMVQVSDQ

SEQ ID NO: 1440 - protein, 41 aa, synthetic construct
MIAEVLITTRTAADNFSTQYVLDGSGHILSQKPSHLGQGTT

SEQ ID NO: 1441 - protein, 41 aa, synthetic construct
MDNFSTQYVLDGSGHILSQKPSHLGQGTTVTALRLFKNLPV

SEQ ID NO: 1442 - protein, 41 aa, synthetic construct
MYVLDGSGHILSQKPSHLGQGTTVTALRLFKNLPVRKQFYS

SEQ ID NO: 1443 - protein, 41 aa, synthetic construct
MIKKIQDLLMSFGILKPDLRIVFVHNKAVIWQKSRVSDHKM

SEQ ID NO: 1444 - protein, 41 aa, synthetic construct
MILKPDLRIVFVHNKAVIWQKSRVSDHKMALMSVLGTAVMN

SEQ ID NO: 1445 - protein, 41 aa, synthetic construct
MKCLKESTRLYPVFFLKIDVPTADVDVNLTPDKSQVLLQNK

SEQ ID NO: 1446 - protein, 41 aa, synthetic construct
MTRLYPVFFLKIDVPTADVDVNLTPDKSQVLLQNKESVLIA

SEQ ID NO: 1447 - protein, 41 aa, synthetic construct
MFFLKIDVPTADVDVNLTPDKSQVLLQNKESVLIALENLMT

SEQ ID NO: 1448 - protein, 41 aa, synthetic construct
MVPTADVDVNLTPDKSQVLLQNKESVLIALENLMTTCYGPL

SEQ ID NO: 1449 - protein, 41 aa, synthetic construct
MQDHRPQFLIENPKTSLEDATLQIEELWKTLSEEEKLNLFN

SEQ ID NO: 1450 - protein, 41 aa, synthetic construct
MFLIENPKTSLEDATLQIEELWKTLSEEEKLNLFNGSHYLD

SEQ ID NO: 1451 - protein, 41 aa, synthetic construct
MNEVYHMYNRHQYPFVVLNISVDSECVDINVTPDKRQILLQ

SEQ ID NO: 1452 - protein, 41 aa, synthetic construct
MPFVVLNISVDSECVDINVTPDKRQILLQEEKLLLAVLKTS

SEQ ID NO: 1453 - protein, 41 aa, synthetic construct
MSQQPLLDVEGNLIKMHAADLEKPMVEKQDQSPSLRTGEEK

SEQ ID NO: 1454 - protein, 41 aa, synthetic construct
MDVEGNLIKMHAADLEKPMVEKQDQSPSLRTGEEKKDVSIS

SEQ ID NO: 1455 - protein, 41 aa, synthetic construct
MIKMHAADLEKPMVEKQDQSPSLRTGEEKKDVSISRLREAF

SEQ ID NO: 1456 - protein, 41 aa, synthetic construct
MGRGSLLLRRGFSDSGGGPPAKQRDLEGAVSRLGGERRTRR

SEQ ID NO: 1457 - protein, 41 aa, synthetic construct
MLRRGFSDSGGGPPAKQRDLEGAVSRLGGERRTRRESRQES

SEQ ID NO: 1458 - protein, 41 aa, synthetic construct
MQVENERRELFEERRAKQTELRLLEQKVELAQLQEEWNEHN

SEQ ID NO: 1459 - protein, 41 aa, synthetic construct
MRELFEERRAKQTELRLLEQKVELAQLQEEWNEHNAKIIKY

SEQ ID NO: 1460 - protein, 41 aa, synthetic construct
MLSLAVLQPTPQVTQEQGHLLPERKDFPVESVKLTEVPVEP

SEQ ID NO: 1461 - protein, 41 aa, synthetic construct
MTQEQGHLLPERKDFPVESVKLTEVPVEPVLTVHPESKSKT

SEQ ID NO: 1462 - protein, 41 aa, synthetic construct
MTVHPESKSKTKTRSRSRGRARNKTSKSRSRSSSSSSSSSS

SEQ ID NO: 1463 - protein, 41 aa, synthetic construct
MKSKTKTRSRSRGRARNKTSKSRSRSSSSSSSSSSSTSSSS

SEQ ID NO: 1464 - protein, 41 aa, synthetic construct
MRSRSRGRARNKTSKSRSRSSSSSSSSSSSTSSSSGSSSSS

SEQ ID NO: 1465 - protein, 41 aa, synthetic construct
MPFVSVAKEKKYYLQSLFQEVGIKVDGYMGSTSPSRHFSSL

SEQ ID NO: 1466 - protein, 41 aa, synthetic construct
MKEKKYYLQSLFQEVGIKVDGYMGSTSPSRHFSSLDIAVCT

SEQ ID NO: 1467 - protein, 41 aa, synthetic construct
MLDILTYKQMVGRAGRKGVDTVGESILICKNSEKSKGIALL

SEQ ID NO: 1468 - protein, 41 aa, synthetic construct
MKQMVGRAGRKGVDTVGESILICKNSEKSKGIALLQGSLKP

SEQ ID NO: 1469 - protein, 41 aa, synthetic construct
MQRNQESVQLGAIEACVMWLLENEFIQSTEASDGTEGKVYH

SEQ ID NO: 1470 - protein, 41 aa, synthetic construct
MVQLGAIEACVMWLLENEFIQSTEASDGTEGKVYHPTHLGS

SEQ ID NO: 1471 - protein, 41 aa, synthetic construct
MIKHSPNIVQDLNKSREHTSSFNCNFQNGNQEHQTCSIFRA

SEQ ID NO: 1472 - protein, 41 aa, synthetic construct
MIVQDLNKSREHTSSFNCNFQNGNQEHQTCSIFRARKRASL

SEQ ID NO: 1473 - protein, 41 aa, synthetic construct
MKSREHTSSFNCNFQNGNQEHQTCSIFRARKRASLDINKEK

SEQ ID NO: 1474 - protein, 41 aa, synthetic construct
MKKTEFRNSGPFAKNVSLSGKEKDNKTSFPLQIKQNCSWNI

SEQ ID NO: 1475 - protein, 41 aa, synthetic construct
MNSGPFAKNVSLSGKEKDNKTSFPLQIKQNCSWNITLTNDN

SEQ ID NO: 1476 - protein, 41 aa, synthetic construct
MKNVSLSGKEKDNKTSFPLQIKQNCSWNITLTNDNFVEHIV

SEQ ID NO: 1477 - protein, 41 aa, synthetic construct
MVVSPRALELSDPVLDEHHQGDQDGGDQDERAEKSKLTGTR

SEQ ID NO: 1478 - protein, 41 aa, synthetic construct
MVLDEHHQGDQDGGDQDERAEKSKLTGTRQNHSFIWSGASF

SEQ ID NO: 1479 - protein, 41 aa, synthetic construct
MGDQDERAEKSKLTGTRQNHSFIWSGASFDLSPGLQRILDK

SEQ ID NO: 1480 - protein, 41 aa, synthetic construct
MAEKSKLTGTRQNHSFIWSGASFDLSPGLQRILDKVSSPLE

SEQ ID NO: 1481 - protein, 41 aa, synthetic construct
MSASLVPPSLDPSLTLKDRMWYLQSCLRKESDKECSVVIYD

SEQ ID NO: 1482 - protein, 41 aa, synthetic construct
MPSLDPSLTLKDRMWYLQSCLRKESDKECSVVIYDFIQSYK

SEQ ID NO: 1483 - protein, 41 aa, synthetic construct
MLTLKDRMWYLQSCLRKESDKECSVVIYDFIQSYKILLLSC

SEQ ID NO: 1484 - protein, 41 aa, synthetic construct
MIETQAYQLAGHSFSFTSSDDIAEVLFLELKLPPNREMKNQ

SEQ ID NO: 1485 - protein, 41 aa, synthetic construct
MQLAGHSFSFTSSDDIAEVLFLELKLPPNREMKNQGSKKTL

SEQ ID NO: 1486 - protein, 41 aa, synthetic construct
MFSFTSSDDIAEVLFLELKLPPNREMKNQGSKKTLGSTRRG

SEQ ID NO: 1487 - protein, 41 aa, synthetic construct
MKVVFPLQREKCLNPFLGMERIYPVSQSHTATGRITFTEPN

SEQ ID NO: 1488 - protein, 41 aa, synthetic construct
MSQSHTATGRITFTEPNIQNVPRDFEIKMPTLVGESPPSQA

SEQ ID NO: 1489 - protein, 41 aa, synthetic construct
MTGRITFTEPNIQNVPRDFEIKMPTLVGESPPSQAVGKGLL

SEQ ID NO: 1490 - protein, 41 aa, synthetic construct
MTEPNIQNVPRDFEIKMPTLVGESPPSQAVGKGLLPMGRGK

SEQ ID NO: 1491 - protein, 41 aa, synthetic construct
MNVPRDFEIKMPTLVGESPPSQAVGKGLLPMGRGKYKKGFS

SEQ ID NO: 1492 - protein, 41 aa, synthetic construct
MKLQGMFCPIRGGFFILQLHDELLYEVAEEDVVQVAQIVKN

SEQ ID NO: 1493 - protein, 41 aa, synthetic construct
MCPIRGGFFILQLHDELLYEVAEEDVVQVAQIVKNEMESAV

SEQ ID NO: 1494 - protein, 41 aa, synthetic construct
MSYPKLHLPLKTLQCLFEKQLHMELASRVCVVSVEKPTLPS

SEQ ID NO: 1495 - protein, 41 aa, synthetic construct
MLPLKTLQCLFEKQLHMELASRVCVVSVEKPTLPSKEVKHA

SEQ ID NO: 1496 - protein, 41 aa, synthetic construct
MQCLFEKQLHMELASRVCVVSVEKPTLPSKEVKHARKTLKT

SEQ ID NO: 1497 - protein, 41 aa, synthetic construct
MASRVCVVSVEKPTLPSKEVKHARKTLKTLRDQWEKALCRA

SEQ ID NO: 1498 - protein, 41 aa, synthetic construct
MEREVYEGRFSLYPFLCLLDEREVVRMLLQVLQALPAQGES

SEQ ID NO: 1499 - protein, 41 aa, synthetic construct
MPFLCLLDEREVVRMLLQVLQALPAQGESFTTLARELSART

SEQ ID NO: 1500 - protein, 41 aa, synthetic construct
MDEREVVRMLLQVLQALPAQGESFTTLARELSARTFSRHVV

SEQ ID NO: 1501 - protein, 41 aa, synthetic construct
MRMLLQVLQALPAQGESFTTLARELSARTFSRHVVQRQRVS

SEQ ID NO: 1502 - protein, 41 aa, synthetic construct
MLQALPAQGESFTTLARELSARTFSRHVVQRQRVSGQVQAL

SEQ ID NO: 1503 - protein, 41 aa, synthetic construct
MMGDFVDRGYYSLETFTYLLALKAKWPDRITLLRGNHESRQ

SEQ ID NO: 1504 - protein, 41 aa, synthetic construct
METFTYLLALKAKWPDRITLLRGNHESRQITQVYGFYDECQ

SEQ ID NO: 1505 - protein, 41 aa, synthetic construct
MLALKAKWPDRITLLRGNHESRQITQVYGFYDECQTKYGNA

SEQ ID NO: 1506 - protein, 41 aa, synthetic construct
MWPDRITLLRGNHESRQITQVYGFYDECQTKYGNANAWRYC

SEQ ID NO: 1507 - protein, 41 aa, synthetic construct
MLWGIDRDSYRRILMGSTLRKRKMYEEFLSKVSILESLDKW

SEQ ID NO: 1508 - protein, 41 aa, synthetic construct
MDSYRRILMGSTLRKRKMYEEFLSKVSILESLDKWERLTVA

SEQ ID NO: 1509 - protein, 41 aa, synthetic construct
MEEFLSKVSILESLDKWERLTVADALEPVQFEDGQKIVVQG

SEQ ID NO: 1510 - protein, 41 aa, synthetic construct
MDTCDMNVHKQCVINVPSLCGMDHTEKRGRIYLKAEVADEK

SEQ ID NO: 1511 - protein, 41 aa, synthetic construct
MVHKQCVINVPSLCGMDHTEKRGRIYLKAEVADEKLHVTVR

SEQ ID NO: 1512 - protein, 41 aa, synthetic construct
MCGMDHTEKRGRIYLKAEVADEKLHVTVRDAKNLIPMDPNG

SEQ ID NO: 1513 - protein, 41 aa, synthetic construct
MAEISIGLFFLHKRGIIYRDLKLDNVMLDSEGHIKIADFGM

SEQ ID NO: 1514 - protein, 41 aa, synthetic construct
MRGIIYRDLKLDNVMLDSEGHIKIADFGMCKEHMMDGVTTR

SEQ ID NO: 1515 - protein, 41 aa, synthetic construct
MEPVSEVTVGVSVLAERCKKNNGKAEFWLDLQPQAKVLMSV

SEQ ID NO: 1516 - protein, 41 aa, synthetic construct
MKNNGKAEFWLDLQPQAKVLMSVQYFLEDVDCKQSMRSEDE

SEQ ID NO: 1517 - protein, 41 aa, synthetic construct
MCAICTDRIWGLGRQGYKCINCKLLVHKKCHKLVTIECGRH

SEQ ID NO: 1518 - protein, 41 aa, synthetic construct
MVHKKCHKLVTIECGRHSLPQEPVMPMDQSSMHSDHAQTVI

SEQ ID NO: 1519 - protein, 41 aa, synthetic construct
MKEQKREERRQLKQQLEDMQKQLRQLQEKFYQIYDSTDSEN

SEQ ID NO: 1520 - protein, 41 aa, synthetic construct
MERRQLKQQLEDMQKQLRQLQEKFYQIYDSTDSENDEDGNL

SEQ ID NO: 1521 - protein, 41 aa, synthetic construct
MSDNEMCELDPGQFIDRARALIREQEMAENKPKREGNNKER

SEQ ID NO: 1522 - protein, 41 aa, synthetic construct
MELDPGQFIDRARALIREQEMAENKPKREGNNKERDHGPNS

SEQ ID NO: 1523 - protein, 41 aa, synthetic construct
MFIDRARALIREQEMAENKPKREGNNKERDHGPNSLQPEGK

SEQ ID NO: 1524 - protein, 41 aa, synthetic construct
MALIREQEMAENKPKREGNNKERDHGPNSLQPEGKHLAETL

SEQ ID NO: 1525 - protein, 41 aa, synthetic construct
MEMAENKPKREGNNKERDHGPNSLQPEGKHLAETLKQELNT

SEQ ID NO: 1526 - protein, 41 aa, synthetic construct
MKASNEDVTKAVDITTPKAARRGRKRKAEKQVETEEAGVVT

SEQ ID NO: 1527 - protein, 41 aa, synthetic construct
MVTKAVDITTPKAARRGRKRKAEKQVETEEAGVVTTATASV

SEQ ID NO: 1528 - protein, 41 aa, synthetic construct
MITTPKAARRGRKRKAEKQVETEEAGVVTTATASVNLKVSP

SEQ ID NO: 1529 - protein, 41 aa, synthetic construct
MSQVIMEKSTMLYNKFKNMFLVGEGDSVITQVLNKSLAEQR

SEQ ID NO: 1530 - protein, 41 aa, synthetic construct
MKSTMLYNKFKNMFLVGEGDSVITQVLNKSLAEQRQHEEAN

SEQ ID NO: 1531 - protein, 41 aa, synthetic construct
MNKFKNMFLVGEGDSVITQVLNKSLAEQRQHEEANKTKDQG

SEQ ID NO: 1532 - protein, 41 aa, synthetic construct
MLETNVEELWVEVGGRVSRELNYTRQKIGEEAMFNPQLMIQ

SEQ ID NO: 1533 - protein, 41 aa, synthetic construct
MGGRVSRELNYTRQKIGEEAMFNPQLMIQTPKEEGANVLTT

SEQ ID NO: 1534 - protein, 41 aa, synthetic construct
MMAAGVLPQNEQPYSTLVNNSECVANMKGNLERPTPKYTKV

SEQ ID NO: 1535 - protein, 41 aa, synthetic construct
MPQNEQPYSTLVNNSECVANMKGNLERPTPKYTKVGERLRH

SEQ ID NO: 1536 - protein, 41 aa, synthetic construct
MPSKPTCDEKYANITVDYLYNKETKLFTAKLNVNENVECGN

SEQ ID NO: 1537 - protein, 41 aa, synthetic construct
MDEKYANITVDYLYNKETKLFTAKLNVNENVECGNNTCTNN

SEQ ID NO: 1538 - protein, 41 aa, synthetic construct
MITVDYLYNKETKLFTAKLNVNENVECGNNTCTNNEVHNLT

SEQ ID NO: 1539 - protein, 41 aa, synthetic construct
MPGVEKFQLHDCTQVEKADTTICLKWKNIETFTCDTQNITY

SEQ ID NO: 1540 - protein, 41 aa, synthetic construct
MQLHDCTQVEKADTTICLKWKNIETFTCDTQNITYRFQCGN

SEQ ID NO: 1541 - protein, 41 aa, synthetic construct
MQVEKADTTICLKWKNIETFTCDTQNITYRFQCGNMIFDNK

SEQ ID NO: 1542 - protein, 41 aa, synthetic construct
MTTICLKWKNIETFTCDTQNITYRFQCGNMIFDNKEIKLEN

SEQ ID NO: 1543 - protein, 41 aa, synthetic construct
MVSMTSDNSMHVKCRPPRDRNGPHERYHLEVEAGNTLVRNE

SEQ ID NO: 1544 - protein, 41 aa, synthetic construct
MNSMHVKCRPPRDRNGPHERYHLEVEAGNTLVRNESHKNCD

SEQ ID NO: 1545 - protein, 41 aa, synthetic construct
MKAYFHNGDYPGEPFILHHSTSYNSKALIAFLAFLIIVTSI

SEQ ID NO: 1546 - protein, 41 aa, synthetic construct
MPFILHHSTSYNSKALIAFLAFLIIVTSIALLVVLYKIYDL

SEQ ID NO: 1547 - protein, 41 aa, synthetic construct
MEEGLIWVVGPVLAVVFIICIVIAILLYKSSKPDRKRAESD

SEQ ID NO: 1548 - protein, 41 aa, synthetic construct
MVVGPVLAVVFIICIVIAILLYKSSKPDRKRAESDSRKSSI

SEQ ID NO: 1549 - protein, 41 aa, synthetic construct
MSIKALDGRSQVSTPRFGKTFDAPPALPKATRKALGTVNRA

SEQ ID NO: 1550 - protein, 41 aa, synthetic construct
MTPRFGKTFDAPPALPKATRKALGTVNRATEKSVKTKGPLK

SEQ ID NO: 1551 - protein, 41 aa, synthetic construct
MNINLKRKFIKKRIIIISNYSKRNSLLEVNEASSVSEAGPD

SEQ ID NO: 1552 - protein, 41 aa, synthetic construct
MKFIKKRIIIISNYSKRNSLLEVNEASSVSEAGPDQTFEVP

SEQ ID NO: 1553 - protein, 41 aa, synthetic construct
MIIIISNYSKRNSLLEVNEASSVSEAGPDQTFEVPKDIIRR

SEQ ID NO: 1554 - protein, 41 aa, synthetic construct
MYSKRNSLLEVNEASSVSEAGPDQTFEVPKDIIRRAKKIPK

SEQ ID NO: 1555 - protein, 41 aa, synthetic construct
MSMAVVGKGECHNIPCEKGDKLRLFCFRLRKRENMSKLMSE

SEQ ID NO: 1556 - protein, 41 aa, synthetic construct
MKGECHNIPCEKGDKLRLFCFRLRKRENMSKLMSEMHSFIQ

SEQ ID NO: 1557 - protein, 41 aa, synthetic construct
MIPCEKGDKLRLFCFRLRKRENMSKLMSEMHSFIQIQKNTN

SEQ ID NO: 1558 - protein, 41 aa, synthetic construct
MDKLRLFCFRLRKRENMSKLMSEMHSFIQIQKNTNQRSHDS

SEQ ID NO: 1559 - protein, 41 aa, synthetic construct
MTNEKSFDNIRNWIRNIEEHASADVEKMILGNKCDVNDKRQ

SEQ ID NO: 1560 - protein, 41 aa, synthetic construct
MDNIRNWIRNIEEHASADVEKMILGNKCDVNDKRQVSKERG

SEQ ID NO: 1561 - protein, 41 aa, synthetic construct
MRNGMSLHDCLMKALKVRGLQPECCAVFRLLHEHKGKKARL

SEQ ID NO: 1562 - protein, 41 aa, synthetic construct
MHDCLMKALKVRGLQPECCAVFRLLHEHKGKKARLDWNTDA

SEQ ID NO: 1563 - protein, 41 aa, synthetic construct
MFSLNQSRVEEITMREEVGNISILQENDFGDFGMDDREIMR

SEQ ID NO: 1564 - protein, 41 aa, synthetic construct
MRVEEITMREEVGNISILQENDFGDFGMDDREIMREGSAFE

SEQ ID NO: 1565 - protein, 41 aa, synthetic construct
MMREEVGNISILQENDFGDFGMDDREIMREGSAFEDDDMLV

SEQ ID NO: 1566 - protein, 41 aa, synthetic construct
MEADNLDEFLKEFENPEVPREDQQQQHQQRDVIDEPIIEEP

SEQ ID NO: 1567 - protein, 41 aa, synthetic construct
MEFLKEFENPEVPREDQQQQHQQRDVIDEPIIEEPSRLQES

SEQ ID NO: 1568 - protein, 41 aa, synthetic construct
MREDQQQQHQQRDVIDEPIIEEPSRLQESVMEASRTNIDES

SEQ ID NO: 1569 - protein, 41 aa, synthetic construct
MCGINANDVKKLEEAGFHTVEAVAYAPKKELINIKGISEAK

SEQ ID NO: 1570 - protein, 41 aa, synthetic construct
MDVKKLEEAGFHTVEAVAYAPKKELINIKGISEAKADKILA

SEQ ID NO: 1571 - protein, 41 aa, synthetic construct
MEAGFHTVEAVAYAPKKELINIKGISEAKADKILAVAERYG

SEQ ID NO: 1572 - protein, 41 aa, synthetic construct
MVEAVAYAPKKELINIKGISEAKADKILAVAERYGLSGSDV

SEQ ID NO: 1573 - protein, 41 aa, synthetic construct
MGVAVVITNQVVAQVDGAAMFAADPKKPIGGNIIAHASTTR

SEQ ID NO: 1574 - protein, 41 aa, synthetic construct
MMFAADPKKPIGGNIIAHASTTRLYLRKGRGETRICKIYDS

SEQ ID NO: 1575 - protein, 41 aa, synthetic construct
MKKPIGGNIIAHASTTRLYLRKGRGETRICKIYDSPCLPEA

SEQ ID NO: 1576 - protein, 41 aa, synthetic construct
MNLARQWCNCAFLESSAKSKINVNEIFYDLVRQINRKTPVE

SEQ ID NO: 1577 - protein, 41 aa, synthetic construct
MCNCAFLESSAKSKINVNEIFYDLVRQINRKTPVEKKKPKK

SEQ ID NO: 1578 - protein, 41 aa, synthetic construct
MESSAKSKINVNEIFYDLVRQINRKTPVEKKKPKKKSCLLL

SEQ ID NO: 1579 - protein, 41 aa, synthetic construct
MICLICGDRQDLEEPTKVDKLQEPLLEALKIYIRKRRPSKP

SEQ ID NO: 1580 - protein, 41 aa, synthetic construct
MDRQDLEEPTKVDKLQEPLLEALKIYIRKRRPSKPHMFPKI

SEQ ID NO: 1581 - protein, 41 aa, synthetic construct
MLIRESDRRPGSFVLSFLSQMNVVNHFRIIAMCGDYYIGGR

SEQ ID NO: 1582 - protein, 41 aa, synthetic construct
MTDEQGLIVEDLVEEVGREEDPHEGKIWFHGKISKQEAYNL

SEQ ID NO: 1583 - protein, 41 aa, synthetic construct
MIVEDLVEEVGREEDPHEGKIWFHGKISKQEAYNLLMTVGQ

SEQ ID NO: 1584 - protein, 41 aa, synthetic construct
MEEVGREEDPHEGKIWFHGKISKQEAYNLLMTVGQVCSFLV

SEQ ID NO: 1585 - protein, 41 aa, synthetic construct
MEDPHEGKIWFHGKISKQEAYNLLMTVGQVCSFLVRPSDNT

SEQ ID NO: 1586 - protein, 41 aa, synthetic construct
MKIWFHGKISKQEAYNLLMTVGQVCSFLVRPSDNTPGDYSL

SEQ ID NO: 1587 - protein, 41 aa, synthetic construct
MLLKKGKGKRWKNLYFILEGSDAQLIYFESEKRATKPKGLI

SEQ ID NO: 1588 - protein, 41 aa, synthetic construct
MGKRWKNLYFILEGSDAQLIYFESEKRATKPKGLIDLSVCS

SEQ ID NO: 1589 - protein, 41 aa, synthetic construct
MLYFILEGSDAQLIYFESEKRATKPKGLIDLSVCSVYVVHD

SEQ ID NO: 1590 - protein, 41 aa, synthetic construct
MKGLIDLSVCSVYVVHDSLFGRPNCFQIVVQHFSEEHYIFY

SEQ ID NO: 1591 - protein, 41 aa, synthetic construct
MRARYSMEKIMPEEEYSEFKELILQKELHVVYALSHVCGQD

SEQ ID NO: 1592 - protein, 41 aa, synthetic construct
MEKIMPEEEYSEFKELILQKELHVVYALSHVCGQDRTLLAS

SEQ ID NO: 1593 - protein, 41 aa, synthetic construct
MYALSHVCGQDRTLLASILLRIFLHEKLESLLLCTLNDREI

SEQ ID NO: 1594 - protein, 41 aa, synthetic construct
MLEKNEDVNTNLTHLLNILSELVEKIFMASEILPPTLRYIY

SEQ ID NO: 1595 - protein, 41 aa, synthetic construct
MVNTNLTHLLNILSELVEKIFMASEILPPTLRYIYGCLQKS

SEQ ID NO: 1596 - protein, 41 aa, synthetic construct
MSELVEKIFMASEILPPTLRYIYGCLQKSVQHKWPTNTTMR

SEQ ID NO: 1597 - protein, 41 aa, synthetic construct
MTQPSSSISTEINSALVLKVSWITFLLAKGEVLQMEDDLVI

SEQ ID NO: 1598 - protein, 41 aa, synthetic construct
MISTEINSALVLKVSWITFLLAKGEVLQMEDDLVISFQLML

SEQ ID NO: 1599 - protein, 41 aa, synthetic construct
MSALVLKVSWITFLLAKGEVLQMEDDLVISFQLMLCVLDYF

SEQ ID NO: 1600 - protein, 41 aa, synthetic construct
MVLQMEDDLVISFQLMLCVLDYFIKLSPPMLLKEPYKTAVI

SEQ ID NO: 1601 - protein, 41 aa, synthetic construct
MLCKEHECNIDEVKNVYFKNFIPFMNSLGLVTSNGLPEVEN

SEQ ID NO: 1602 - protein, 41 aa, synthetic construct
MCNIDEVKNVYFKNFIPFMNSLGLVTSNGLPEVENLSKRYE

SEQ ID NO: 1603 - protein, 41 aa, synthetic construct
MKNVYFKNFIPFMNSLGLVTSNGLPEVENLSKRYEEIYLKN

SEQ ID NO: 1604 - protein, 41 aa, synthetic construct
MNFIPFMNSLGLVTSNGLPEVENLSKRYEEIYLKNKDLDAR

SEQ ID NO: 1605 - protein, 41 aa, synthetic construct
MLDARLFLDHDKTLQTDSIDSFETQRTPRKSNLDEEVNVIP

SEQ ID NO: 1606 - protein, 41 aa, synthetic construct
MLDHDKTLQTDSIDSFETQRTPRKSNLDEEVNVIPPHTPVR

SEQ ID NO: 1607 - protein, 41 aa, synthetic construct
MTPVRTVMNTIQQLMMILNSASDQPSENLISYFNNCTVNPK

SEQ ID NO: 1608 - protein, 41 aa, synthetic construct
MMNTIQQLMMILNSASDQPSENLISYFNNCTVNPKESILKR

SEQ ID NO: 1609 - protein, 41 aa, synthetic construct
MLMMILNSASDQPSENLISYFNNCTVNPKESILKRVKDIGY

SEQ ID NO: 1610 - protein, 41 aa, synthetic construct
MSASDQPSENLISYFNNCTVNPKESILKRVKDIGYIFKEKF

SEQ ID NO: 1611 - protein, 41 aa, synthetic construct
MSENLISYFNNCTVNPKESILKRVKDIGYIFKEKFAKAVGQ

SEQ ID NO: 1612 - protein, 41 aa, synthetic construct
MQHTLQNEYELMRDRHLDQIMMCSMYGICKVKNIDLKFKII

SEQ ID NO: 1613 - protein, 41 aa, synthetic construct
MIMMCSMYGICKVKNIDLKFKIIVTAYKDLPHAVQETFKRV

SEQ ID NO: 1614 - protein, 41 aa, synthetic construct
MKNIDLKFKIIVTAYKDLPHAVQETFKRVLIKEEEYDSIIV

SEQ ID NO: 1615 - protein, 41 aa, synthetic construct
MFKIIVTAYKDLPHAVQETFKRVLIKEEEYDSIIVFYNSVF

SEQ ID NO: 1616 - protein, 41 aa, synthetic construct
MAYKDLPHAVQETFKRVLIKEEEYDSIIVFYNSVFMQRLKT

SEQ ID NO: 1617 - protein, 41 aa, synthetic construct
MHAVQETFKRVLIKEEEYDSIIVFYNSVFMQRLKTNILQYA

SEQ ID NO: 1618 - protein, 41 aa, synthetic construct
MLQHQGWAAIMANLEDCSNSYQKLLFKFESIYSNYLQSIED

SEQ ID NO: 1619 - protein, 41 aa, synthetic construct
MAAIMANLEDCSNSYQKLLFKFESIYSNYLQSIEDIKLKLT

SEQ ID NO: 1620 - protein, 41 aa, synthetic construct
MDTKDGDLPFFNVSLLDWINVQDRPNDVESLVRKCFDSMSR

SEQ ID NO: 1621 - protein, 41 aa, synthetic construct
MLPFFNVSLLDWINVQDRPNDVESLVRKCFDSMSRLDPRII

SEQ ID NO: 1622 - protein, 41 aa, synthetic construct
MERVKIVEALSTVPQMYCLAVVEVVRRKMFIKHYREWAGAL

SEQ ID NO: 1623 - protein, 41 aa, synthetic construct
MEALSTVPQMYCLAVVEVVRRKMFIKHYREWAGALVKDGKR

SEQ ID NO: 1624 - protein, 41 aa, synthetic construct
MEAEKSKRESFGKLFRKSFLRNRLFRGLDSWPPSFCTQKPR

SEQ ID NO: 1625 - protein, 41 aa, synthetic construct
MPLHQHVLALHNLVKAAQSLDEMSQTITDLLSEQKASVSQT

SEQ ID NO: 1626 - protein, 41 aa, synthetic construct
MIQDNNENYQVGLAELRTLMTIEKDQCISELISRHEEESNI

SEQ ID NO: 1627 - protein, 41 aa, synthetic construct
MNYQVGLAELRTLMTIEKDQCISELISRHEEESNILKAELN

SEQ ID NO: 1628 - protein, 41 aa, synthetic construct
MAELRTLMTIEKDQCISELISRHEEESNILKAELNKVTSLH

SEQ ID NO: 1629 - protein, 41 aa, synthetic construct
MMTIEKDQCISELISRHEEESNILKAELNKVTSLHNQAFEI

SEQ ID NO: 1630 - protein, 41 aa, synthetic construct
MEEKAKFLEQLEEQEKRKNEEMQNVRTSLIAEQQTNFNTVL

SEQ ID NO: 1631 - protein, 41 aa, synthetic construct
MQEKRKNEEMQNVRTSLIAEQQTNFNTVLTREKMRKENIIN

SEQ ID NO: 1632 - protein, 41 aa, synthetic construct
MEEMQNVRTSLIAEQQTNFNTVLTREKMRKENIINDLSDKL

SEQ ID NO: 1633 - protein, 41 aa, synthetic construct
MRIERLERNFEVSTVIFKKYEPIFLDIFQNPYEEPPKLPRS

SEQ ID NO: 1634 - protein, 41 aa, synthetic construct
MRNFEVSTVIFKKYEPIFLDIFQNPYEEPPKLPRSRKQRRI

SEQ ID NO: 1635 - protein, 41 aa, synthetic construct
MTVIFKKYEPIFLDIFQNPYEEPPKLPRSRKQRRIPCSVKD

SEQ ID NO: 1636 - protein, 41 aa, synthetic construct
MYEPIFLDIFQNPYEEPPKLPRSRKQRRIPCSVKDLFNFCW

SEQ ID NO: 1637 - protein, 41 aa, synthetic construct
MREVVAYNKNINDDFEMIDCDLEDATKTPDCSSGPVKEERG

SEQ ID NO: 1638 - protein, 41 aa, synthetic construct
MNKNINDDFEMIDCDLEDATKTPDCSSGPVKEERGDLIKFY

SEQ ID NO: 1639 - protein, 41 aa, synthetic construct
MDFEMIDCDLEDATKTPDCSSGPVKEERGDLIKFYNTIYVG

SEQ ID NO: 1640 - protein, 41 aa, synthetic construct
MEERGDLIKFYNTIYVGRVKSFALKYDLANQDHMMDAPPLS

SEQ ID NO: 1641 - protein, 41 aa, synthetic construct
MIKFYNTIYVGRVKSFALKYDLANQDHMMDAPPLSPFPHIK

SEQ ID NO: 1642 - protein, 41 aa, synthetic construct
MDHLAWKPESPLWEKIRDNENRVPTCEEVMPPQNLERADEI

SEQ ID NO: 1643 - protein, 41 aa, synthetic construct
MPESPLWEKIRDNENRVPTCEEVMPPQNLERADEICIAGSP

SEQ ID NO: 1644 - protein, 41 aa, synthetic construct
MEKIRDNENRVPTCEEVMPPQNLERADEICIAGSPLTPRRV

SEQ ID NO: 1645 - protein, 41 aa, synthetic construct
MLVTMATATVTANNGQTVTIPVQGIANENGGITFFPVQVNV

SEQ ID NO: 1646 - protein, 41 aa, synthetic construct
MANMDAPPLSPYPFVRTGSPRRIQLSQNHPVYISPHKNETM

SEQ ID NO: 1647 - protein, 41 aa, synthetic construct
MFVRTGSPRRIQLSQNHPVYISPHKNETMLSPREKIFYYFS

SEQ ID NO: 1648 - protein, 41 aa, synthetic construct
MQSQQYLYWDGERRTYVPALEQSADGHKETGAPSKEGKEKK

SEQ ID NO: 1649 - protein, 41 aa, synthetic construct
MYWDGERRTYVPALEQSADGHKETGAPSKEGKEKKEKHKTK

SEQ ID NO: 1650 - protein, 41 aa, synthetic construct
MYKTLKISELGSQLSDEAVEDGLFHEFKRFGDVSVKISHLS

SEQ ID NO: 1651 - protein, 41 aa, synthetic construct
MLSDEAVEDGLFHEFKRFGDVSVKISHLSGSGSGDERVAFV

SEQ ID NO: 1652 - protein, 41 aa, synthetic construct
MEDGLFHEFKRFGDVSVKISHLSGSGSGDERVAFVNFRRPE

SEQ ID NO: 1653 - protein, 41 aa, synthetic construct
MPLLLAVTGVAEVAGGLAPGSAGALCCNHSKDNQMCRDVCE

SEQ ID NO: 1654 - protein, 41 aa, synthetic construct
MTGVAEVAGGLAPGSAGALCCNHSKDNQMCRDVCEQIFSSK

SEQ ID NO: 1655 - protein, 41 aa, synthetic construct
MNNRTYPSIQIMNYYGKGKVRITLVTKNDPYKPHPHDLVGK

SEQ ID NO: 1656 - protein, 41 aa, synthetic construct
MSIQIMNYYGKGKVRITLVTKNDPYKPHPHDLVGKDCRDGY

SEQ ID NO: 1657 - protein, 41 aa, synthetic construct
MYYGKGKVRITLVTKNDPYKPHPHDLVGKDCRDGYYEAEFG

SEQ ID NO: 1658 - protein, 41 aa, synthetic construct
MVRITLVTKNDPYKPHPHDLVGKDCRDGYYEAEFGQERRPL

SEQ ID NO: 1659 - protein, 41 aa, synthetic construct
MTIKKETDVFWKSLDFKEQVAEETSGDSKARNLADDSSENK

SEQ ID NO: 1660 - protein, 41 aa, synthetic construct
MLDFKEQVAEETSGDSKARNLADDSSENKVENLLWVDKYKP

SEQ ID NO: 1661 - protein, 41 aa, synthetic construct
MVAEETSGDSKARNLADDSSENKVENLLWVDKYKPTSLKTI

SEQ ID NO: 1662 - protein, 41 aa, synthetic construct
MHALIMDEVDGMAGNEDRGGIQELIGLIKHTKIPIICMCND

SEQ ID NO: 1663 - protein, 41 aa, synthetic construct
MEVDGMAGNEDRGGIQELIGLIKHTKIPIICMCNDRNHPKI

SEQ ID NO: 1664 - protein, 41 aa, synthetic construct
MQVVVDNVFPNCILLLKLPGLEKLLHHVTEEKGNPEIDNKK

SEQ ID NO: 1665 - protein, 41 aa, synthetic construct
MVFPNCILLLKLPGLEKLLHHVTEEKGNPEIDNKKYYKYSK

SEQ ID NO: 1666 - protein, 41 aa, synthetic construct
MLLLKLPGLEKLLHHVTEEKGNPEIDNKKYYKYSKEKTLKW

SEQ ID NO: 1667 - protein, 41 aa, synthetic construct
MGLEKLLHHVTEEKGNPEIDNKKYYKYSKEKTLKWLEKKVN

SEQ ID NO: 1668 - protein, 41 aa, synthetic construct
MQASTDKEKDYIRYAHGLISDYIPKELSDDLSKYLKLPEPS

SEQ ID NO: 1669 - protein, 41 aa, synthetic construct
MYAHGLISDYIPKELSDDLSKYLKLPEPSASLPNPPSKKIK

SEQ ID NO: 1670 - protein, 41 aa, synthetic construct
MSDYIPKELSDDLSKYLKLPEPSASLPNPPSKKIKLSDEPV

SEQ ID NO: 1671 - protein, 41 aa, synthetic construct
MKTEKKNSKMTAAQKALAKVDKSGMKSIDTFFGVKKKLERF

SEQ ID NO: 1672 - protein, 41 aa, synthetic construct
MSKMTAAQKALAKVDKSGMKSIDTFFGVKKKLERFETLKIK

SEQ ID NO: 1673 - protein, 41 aa, synthetic construct
MIFYRGSGLISSISIDWLYQRMYFIMDELVCVCDLENCSNI

SEQ ID NO: 1674 - protein, 41 aa, synthetic construct
MGLISSISIDWLYQRMYFIMDELVCVCDLENCSNIEEITPP

SEQ ID NO: 1675 - protein, 41 aa, synthetic construct
MGYLYWTTLYSVESTRLNGESSLVLQTQPWFSGKKVIALTL

SEQ ID NO: 1676 - protein, 41 aa, synthetic construct
MTLYSVESTRLNGESSLVLQTQPWFSGKKVIALTLDLSDGL

SEQ ID NO: 1677 - protein, 41 aa, synthetic construct
MFTVEGLEPYALFNLSVTPYTYWGKGPKTSLSLRAPETVPS

SEQ ID NO: 1678 - protein, 41 aa, synthetic construct
MYTYWGKGPKTSLSLRAPETVPSAPENPRIFILPSGKCCNK

SEQ ID NO: 1679 - protein, 41 aa, synthetic construct
MNLQNQNLRWKMTFNGSCSSVCTWKSKNLKGIFQFRVVAAN

SEQ ID NO: 1680 - protein, 41 aa, synthetic construct
MLRWKMTFNGSCSSVCTWKSKNLKGIFQFRVVAANNLGFGE

SEQ ID NO: 1681 - protein, 41 aa, synthetic construct
MLQERIKVNGKAGNLGGGVVTIERSKSKITVTSEVPFSKRY

SEQ ID NO: 1682 - protein, 41 aa, synthetic construct
MNLGGGVVTIERSKSKITVTSEVPFSKRYLKYLTKKYLKKN

SEQ ID NO: 1683 - protein, 41 aa, synthetic construct
MAGPDGVEEIKRHSFFSTIDWNKLYRREIHPPFKPATGRPE

SEQ ID NO: 1684 - protein, 41 aa, synthetic construct
MEEIKRHSFFSTIDWNKLYRREIHPPFKPATGRPEDTFYFD

SEQ ID NO: 1685 - protein, 41 aa, synthetic construct
MGELLDKILRQKFFSEREASAVLFTITKTVEYLHAQGVVHR

SEQ ID NO: 1686 - protein, 41 aa, synthetic construct
MILRQKFFSEREASAVLFTITKTVEYLHAQGVVHRDLKPSN

SEQ ID NO: 1687 - protein, 41 aa, synthetic construct
MKDRDEFPMILIGNKADLDHQRQVTQEEGQQLARQLKVTYM

SEQ ID NO: 1688 - protein, 41 aa, synthetic construct
MNKADLDHQRQVTQEEGQQLARQLKVTYMEASAKIRMNVDQ

SEQ ID NO: 1689 - protein, 41 aa, synthetic construct
MKGGGSSSSHSRQQSPVNPDPVALDAHREFLHRPASGYVPE

SEQ ID NO: 1690 - protein, 41 aa, synthetic construct
MDPVALDAHREFLHRPASGYVPEEIWKKAEEAVNEVKRQAM

SEQ ID NO: 1691 - protein, 41 aa, synthetic construct
MRQAMTELQKAVSEAERKAHDMITTERAKMERTVAEAKRQA

SEQ ID NO: 1692 - protein, 41 aa, synthetic construct
MHDMITTERAKMERTVAEAKRQAAEDALAVINQQEDSSESC

SEQ ID NO: 1693 - protein, 41 aa, synthetic construct
MERAKMERTVAEAKRQAAEDALAVINQQEDSSESCWNCGRK

SEQ ID NO: 1694 - protein, 41 aa, synthetic construct
MRTVAEAKRQAAEDALAVINQQEDSSESCWNCGRKASETCS

SEQ ID NO: 1695 - protein, 41 aa, synthetic construct
MKRQAAEDALAVINQQEDSSESCWNCGRKASETCSGCNTAR

SEQ ID NO: 1696 - protein, 41 aa, synthetic construct
MQPQQFRNDNRQQFNSGRDQERFGRRSFGNRVENDRERYGN

SEQ ID NO: 1697 - protein, 41 aa, synthetic construct
MNDNRQQFNSGRDQERFGRRSFGNRVENDRERYGNRNDDRD

SEQ ID NO: 1698 - protein, 41 aa, synthetic construct
MFNSGRDQERFGRRSFGNRVENDRERYGNRNDDRDNSNRDR

SEQ ID NO: 1699 - protein, 41 aa, synthetic construct
MRSFGNRVENDRERYGNRNDDRDNSNRDRREWGRRSPDRDR

SEQ ID NO: 1700 - protein, 41 aa, synthetic construct
MVENDRERYGNRNDDRDNSNRDRREWGRRSPDRDRHRDLEE

SEQ ID NO: 1701 - protein, 41 aa, synthetic construct
MDRGMVWNTDLVETLELQNLMLCALQTIYGAEARKESRGAH

SEQ ID NO: 1702 - protein, 41 aa, synthetic construct
MNTDLVETLELQNLMLCALQTIYGAEARKESRGAHAREDYK

SEQ ID NO: 1703 - protein, 41 aa, synthetic construct
MLMLCALQTIYGAEARKESRGAHAREDYKVRIDEYDYSKPI

SEQ ID NO: 1704 - protein, 41 aa, synthetic construct
MQTIYGAEARKESRGAHAREDYKVRIDEYDYSKPIQGQQKK

SEQ ID NO: 1705 - protein, 41 aa, synthetic construct
MIAQNDKHTGPVRALDVNIFQTNLVASGANESEIYIWDLNN

SEQ ID NO: 1706 - protein, 41 aa, synthetic construct
MHTGPVRALDVNIFQTNLVASGANESEIYIWDLNNFATPMT

SEQ ID NO: 1707 - protein, 41 aa, synthetic construct
MFQTNLVASGANESEIYIWDLNNFATPMTPGAKTQPPEDIS

SEQ ID NO: 1708 - protein, 41 aa, synthetic construct
MAKTQPPEDISCIAWNRQVQHILASASPSGRATVWDLRKNE

SEQ ID NO: 1709 - protein, 41 aa, synthetic construct
MMADAIILAIAGGQELLARTQKKYFAKSQSKITRLITAVVM

SEQ ID NO: 1710 - protein, 41 aa, synthetic construct
MLAIAGGQELLARTQKKYFAKSQSKITRLITAVVMKNWKEI

SEQ ID NO: 1711 - protein, 41 aa, synthetic construct
MQDRKKVRVEVEQGETSVPPGSALVGPSCVMDDFRDPQRWK

SEQ ID NO: 1712 - protein, 41 aa, synthetic construct
MPGSALVGPSCVMDDFRDPQRWKECAKQGKMPCYFDLIEEN

SEQ ID NO: 1713 - protein, 41 aa, synthetic construct
MGDYCSNRRFQRKQHADVEVILTEKKGWGLRAAKDLPSNTF

SEQ ID NO: 1714 - protein, 41 aa, synthetic construct
MRRFQRKQHADVEVILTEKKGWGLRAAKDLPSNTFVLEYCG

SEQ ID NO: 1715 - protein, 41 aa, synthetic construct
MINEETPSQDEEEGVSDVESERSQEQPDKTVDISDLATKLL

SEQ ID NO: 1716 - protein, 41 aa, synthetic construct
MSQDEEEGVSDVESERSQEQPDKTVDISDLATKLLDSWKDL

SEQ ID NO: 1717 - protein, 41 aa, synthetic construct
MGVSDVESERSQEQPDKTVDISDLATKLLDSWKDLKEVYRI

SEQ ID NO: 1718 - protein, 41 aa, synthetic construct
MDISDLATKLLDSWKDLKEVYRIPKKSQTEKENTTTERGRD

SEQ ID NO: 1719 - protein, 41 aa, synthetic construct
MWKDLKEVYRIPKKSQTEKENTTTERGRDAVGFRDQTPAPK

SEQ ID NO: 1720 - protein, 41 aa, synthetic construct
MVYRIPKKSQTEKENTTTERGRDAVGFRDQTPAPKTPNRSR

SEQ ID NO: 1721 - protein, 41 aa, synthetic construct
MKERKIMKLLLKIKNGTPPMRKAALRQITDKAREFGAGPLF

SEQ ID NO: 1722 - protein, 41 aa, synthetic construct
MKLLLKIKNGTPPMRKAALRQITDKAREFGAGPLFNQILPL

SEQ ID NO: 1723 - protein, 41 aa, synthetic construct
MRGKGLAAFLKAIGYLIPLMDAEYANYYTREVMLILIREFQ

SEQ ID NO: 1724 - protein, 41 aa, synthetic construct
MAFLKAIGYLIPLMDAEYANYYTREVMLILIREFQSPDEEM

SEQ ID NO: 1725 - protein, 41 aa, synthetic construct
MEELRQALEKFEESKEVAETSMHNLLETDIEQVSQLSALVD

SEQ ID NO: 1726 - protein, 41 aa, synthetic construct
MTSMHNLLETDIEQVSQLSALVDAQLDYHRQAVQILDELAE

SEQ ID NO: 1727 - protein, 41 aa, synthetic construct
MTNLMTTTEMPFTTSVFQIYNVQRTPLMDNWYSLSYLYFST

SEQ ID NO: 1728 - protein, 41 aa, synthetic construct
MTSVFQIYNVQRTPLMDNWYSLSYLYFSTVGTLVTLLVGIL

SEQ ID NO: 1729 - protein, 41 aa, synthetic construct
MEEKWCEKAVKSLVKKLKKTGRLDELEKAITTQNCNTKCVT

SEQ ID NO: 1730 - protein, 41 aa, synthetic construct
MKAVKSLVKKLKKTGRLDELEKAITTQNCNTKCVTIPSTCS

SEQ ID NO: 1731 - protein, 41 aa, synthetic construct
MPISNHPAPEYWCSIAYFEMDVQVGETFKVPSSCPIVTVDG

SEQ ID NO: 1732 - protein, 41 aa, synthetic construct
MAPEYWCSIAYFEMDVQVGETFKVPSSCPIVTVDGYVDPSG

SEQ ID NO: 1733 - protein, 41 aa, synthetic construct
MSIAYFEMDVQVGETFKVPSSCPIVTVDGYVDPSGGDRFCL

SEQ ID NO: 1734 - protein, 41 aa, synthetic construct
MRFCLGQLSNVHRTEAIERARLHIGKGVQLECKGEGDVWVR

SEQ ID NO: 1735 - protein, 41 aa, synthetic construct
MLSNVHRTEAIERARLHIGKGVQLECKGEGDVWVRCLSDHA

SEQ ID NO: 1736 - protein, 41 aa, synthetic construct
MARLHIGKGVQLECKGEGDVWVRCLSDHAVFVQSYYLDREA

SEQ ID NO: 1737 - protein, 41 aa, synthetic construct
MATEATAATEKGEKKKEKNVSSFQLKLAAKAPKSEKEMDPE

SEQ ID NO: 1738 - protein, 41 aa, synthetic construct
MKKKEKNVSSFQLKLAAKAPKSEKEMDPEYEEKMKADRAKR

SEQ ID NO: 1739 - protein, 41 aa, synthetic construct
MAAFIRDEMMPGEWDVCVTSYEMVIKEKSVFKKFHWRYLVI

SEQ ID NO: 1740 - protein, 41 aa, synthetic construct
MKEKSVFKKFHWRYLVIDEAHRIKNEKSKLSEIVREFKSTN

SEQ ID NO: 1741 - protein, 41 aa, synthetic construct
MKKFHWRYLVIDEAHRIKNEKSKLSEIVREFKSTNRLLLTG

SEQ ID NO: 1742 - protein, 41 aa, synthetic construct
MAHRIKNEKSKLSEIVREFKSTNRLLLTGTPLQNNLHELWA

SEQ ID NO: 1743 - protein, 41 aa, synthetic construct
MPYLFDGAEPGPPYTTDEHIVSNSGKMVVLDKLLAKLKEQG

SEQ ID NO: 1744 - protein, 41 aa, synthetic construct
MIVSNSGKMVVLDKLLAKLKEQGSRVLIFSQMTRLLDILED

SEQ ID NO: 1745 - protein, 41 aa, synthetic construct
MKKKKKKAENAEGQTPAIGPDGEPLDETSQMSDLPVKVIHV

SEQ ID NO: 1746 - protein, 41 aa, synthetic construct
MAENAEGQTPAIGPDGEPLDETSQMSDLPVKVIHVESGKIL

SEQ ID NO: 1747 - protein, 41 aa, synthetic construct
MPDGEPLDETSQMSDLPVKVIHVESGKILTGTDAPKAGQLE

SEQ ID NO: 1748 - protein, 41 aa, synthetic construct
MTTLATSVTLLKASEVEEILDGNDEKYKAVSISTEPPTYLR

SEQ ID NO: 1749 - protein, 41 aa, synthetic construct
MVTLLKASEVEEILDGNDEKYKAVSISTEPPTYLREQKAKR

SEQ ID NO: 1750 - protein, 41 aa, synthetic construct
MQQQIEKEIKEKDSELNQKRPQYIKAKENTSHKIKKLEAAK

SEQ ID NO: 1751 - protein, 41 aa, synthetic construct
MEIKEKDSELNQKRPQYIKAKENTSHKIKKLEAAKKSLQNA

SEQ ID NO: 1752 - protein, 41 aa, synthetic construct
MSELNQKRPQYIKAKENTSHKIKKLEAAKKSLQNAQKHYKK

SEQ ID NO: 1753 - protein, 41 aa, synthetic construct
MRPQYIKAKENTSHKIKKLEAAKKSLQNAQKHYKKRKGDMD

SEQ ID NO: 1754 - protein, 41 aa, synthetic construct
MKEKEERGIARLAQATQERTDLYAKQGRGSQFTSKEERDKW

SEQ ID NO: 1755 - protein, 41 aa, synthetic construct
MQATQERTDLYAKQGRGSQFTSKEERDKWIKKELKSLDQAI

SEQ ID NO: 1756 - protein, 41 aa, synthetic construct
MTDLYAKQGRGSQFTSKEERDKWIKKELKSLDQAINDKKRQ

SEQ ID NO: 1757 - protein, 41 aa, synthetic construct
MQGRGSQFTSKEERDKWIKKELKSLDQAINDKKRQIAAIHK

SEQ ID NO: 1758 - protein, 41 aa, synthetic construct
MEVKNKKDELQSERNYLWREENAEQQALAAKREDLEKKQQL

SEQ ID NO: 1759 - protein, 41 aa, synthetic construct
MDELQSERNYLWREENAEQQALAAKREDLEKKQQLLRAATG

SEQ ID NO: 1760 - protein, 41 aa, synthetic construct
MRNYLWREENAEQQALAAKREDLEKKQQLLRAATGKAILNG

SEQ ID NO: 1761 - protein, 41 aa, synthetic construct
MKSRLELQKDVRKAEEELGELEAKLNENLRRNIERINNEID

SEQ ID NO: 1762 - protein, 41 aa, synthetic construct
MQKDVRKAEEELGELEAKLNENLRRNIERINNEIDQLMNQM

SEQ ID NO: 1763 - protein, 41 aa, synthetic construct
MKFKASRDSILSEMKMLKEKRQQSEKTFMPKQRSLQSLEAS

SEQ ID NO: 1764 - protein, 41 aa, synthetic construct
MDSILSEMKMLKEKRQQSEKTFMPKQRSLQSLEASLHAMES

SEQ ID NO: 1765 - protein, 41 aa, synthetic construct
MMKMLKEKRQQSEKTFMPKQRSLQSLEASLHAMESTRESLK

SEQ ID NO: 1766 - protein, 41 aa, synthetic construct
MKRQQSEKTFMPKQRSLQSLEASLHAMESTRESLKAELGTD

SEQ ID NO: 1767 - protein, 41 aa, synthetic construct
MMARSEDLDNSIDKTEAGIKELQKSMERWKNMEKEHMDAIN

SEQ ID NO: 1768 - protein, 41 aa, synthetic construct
MLDNSIDKTEAGIKELQKSMERWKNMEKEHMDAINHDTKEL

SEQ ID NO: 1769 - protein, 41 aa, synthetic construct
MKTEAGIKELQKSMERWKNMEKEHMDAINHDTKELEKMTNR

SEQ ID NO: 1770 - protein, 41 aa, synthetic construct
MGESERGSGSQSSVPSVDQFTGVGIRVSFTGKQGEMREMQQ

SEQ ID NO: 1771 - protein, 41 aa, synthetic construct
MSGSQSSVPSVDQFTGVGIRVSFTGKQGEMREMQQLSGGQK

SEQ ID NO: 1772 - protein, 41 aa, synthetic construct
MQAQPRSASDVEERVQKSFPHPIDKWAIADAQSAIEKRKRR

SEQ ID NO: 1773 - protein, 41 aa, synthetic construct
MRVQKSFPHPIDKWAIADAQSAIEKRKRRNPLSLPVEKIHP

SEQ ID NO: 1774 - protein, 41 aa, synthetic construct
MLSLPVEKIHPLLKEVLGYKIDHQVSVYIVAVLEYISADIL

SEQ ID NO: 1775 - protein, 41 aa, synthetic construct
MKIHPLLKEVLGYKIDHQVSVYIVAVLEYISADILKLVGNY

SEQ ID NO: 1776 - protein, 41 aa, synthetic construct
MKEVLGYKIDHQVSVYIVAVLEYISADILKLVGNYVRNIRH

SEQ ID NO: 1777 - protein, 41 aa, synthetic construct
MKIDHQVSVYIVAVLEYISADILKLVGNYVRNIRHYEITKQ

SEQ ID NO: 1778 - protein, 41 aa, synthetic construct
MSVYIVAVLEYISADILKLVGNYVRNIRHYEITKQDIKVAM

SEQ ID NO: 1779 - protein, 41 aa, synthetic construct
MSGMEKICSKSLAKRRLSESACRFYSQQMKGKQLAIKKMNE

SEQ ID NO: 1780 - protein, 41 aa, synthetic construct
MCSKSLAKRRLSESACRFYSQQMKGKQLAIKKMNEIQKNID

SEQ ID NO: 1781 - protein, 41 aa, synthetic construct
MVEHHFYDFERDAYLLQRMEEFIGTVRGKAMKKWVESITKI

SEQ ID NO: 1782 - protein, 41 aa, synthetic construct
MDFERDAYLLQRMEEFIGTVRGKAMKKWVESITKIIQRKKI

SEQ ID NO: 1783 - protein, 41 aa, synthetic construct
MYLLQRMEEFIGTVRGKAMKKWVESITKIIQRKKIARDNGP

SEQ ID NO: 1784 - protein, 41 aa, synthetic construct
MEEFIGTVRGKAMKKWVESITKIIQRKKIARDNGPGHNITF

SEQ ID NO: 1785 - protein, 41 aa, synthetic construct
MITKIIQRKKIARDNGPGHNITFQSSPPTVEWHISRPGHIE

SEQ ID NO: 1786 - protein, 41 aa, synthetic construct
MVLEVVSAMNSSPVYRLDHTFEQIPSRQKKILEEAHELSED

SEQ ID NO: 1787 - protein, 41 aa, synthetic construct
MAMNSSPVYRLDHTFEQIPSRQKKILEEAHELSEDHYKKYL

SEQ ID NO: 1788 - protein, 41 aa, synthetic construct
MPDLHNAELSKMLGKSWKALTLAEKRPFVEEAERLRVQHMQ

SEQ ID NO: 1789 - protein, 41 aa, synthetic construct
MELSKMLGKSWKALTLAEKRPFVEEAERLRVQHMQDHPNYK

SEQ ID NO: 1790 - protein, 41 aa, synthetic construct
MGKSWKALTLAEKRPFVEEAERLRVQHMQDHPNYKYRPRRR

SEQ ID NO: 1791 - protein, 41 aa, synthetic construct
MLTLAEKRPFVEEAERLRVQHMQDHPNYKYRPRRRKQVKRL

SEQ ID NO: 1792 - protein, 41 aa, synthetic construct
MERSVPRGPSNPRKSVSSPTSSNTPTPTKHLRTPSTKPKQE

SEQ ID NO: 1793 - protein, 41 aa, synthetic construct
MGPSNPRKSVSSPTSSNTPTPTKHLRTPSTKPKQENEGGEK

SEQ ID NO: 1794 - protein, 41 aa, synthetic construct
MKSVSSPTSSNTPTPTKHLRTPSTKPKQENEGGEKAALESQ

SEQ ID NO: 1795 - protein, 41 aa, synthetic construct
MELKKYKEKRTLNAEGTDALGPNVDGTSVSPGDTEPMIRAL

SEQ ID NO: 1796 - protein, 41 aa, synthetic construct
MEKRTLNAEGTDALGPNVDGTSVSPGDTEPMIRALEEKNKN

SEQ ID NO: 1797 - protein, 41 aa, synthetic construct
MNSEGAASHTGDSSCPTSITQESSFGSPTGNQLSSDIDEYK

SEQ ID NO: 1798 - protein, 41 aa, synthetic construct
MSCPTSITQESSFGSPTGNQLSSDIDEYKKNIHGNALRTSG

SEQ ID NO: 1799 - protein, 41 aa, synthetic construct
MASDFEHITAETPSRPLSSTSNPFKSSKCSTAGSSPNSVSE

SEQ ID NO: 1800 - protein, 41 aa, synthetic construct
MSRPLSSTSNPFKSSKCSTAGSSPNSVSELSLASLTEKIQK

SEQ ID NO: 1801 - protein, 41 aa, synthetic construct
MEECRVTLEGLKMENGSLKSHLQGEKQKATEASAVEQTAES

SEQ ID NO: 1802 - protein, 41 aa, synthetic construct
MLEGLKMENGSLKSHLQGEKQKATEASAVEQTAESCEVQEM

SEQ ID NO: 1803 - protein, 41 aa, synthetic construct
MNDIKCEAQQELRTVKRKLLEEEEKNARLQKELGDVQGHGR

SEQ ID NO: 1804 - protein, 41 aa, synthetic construct
MAQQELRTVKRKLLEEEEKNARLQKELGDVQGHGRVVTSRA

SEQ ID NO: 1805 - protein, 41 aa, synthetic construct
MSSSWSDGLAFCALLHTYLPAHIPYQELNSQEKKRNLLLAF

SEQ ID NO: 1806 - protein, 41 aa, synthetic construct
MGLAFCALLHTYLPAHIPYQELNSQEKKRNLLLAFEAAESV

SEQ ID NO: 1807 - protein, 41 aa, synthetic construct
MPAHIPYQELNSQEKKRNLLLAFEAAESVGIKPSLELSEML

SEQ ID NO: 1808 - protein, 41 aa, synthetic construct
MEKKRNLLLAFEAAESVGIKPSLELSEMLYTDRPDWQSVMQ

SEQ ID NO: 1809 - protein, 41 aa, synthetic construct
MAESWCYTQIKVVKFSYMWTINNFSFCREEMGEVIKSSTFS

SEQ ID NO: 1810 - protein, 41 aa, synthetic construct
MTQIKVVKFSYMWTINNFSFCREEMGEVIKSSTFSSGANDK

SEQ ID NO: 1811 - protein, 41 aa, synthetic construct
MILTDLAAYFEEIGHPDSKDIRARQESLVCRFEALKEPLAT

SEQ ID NO: 1812 - protein, 41 aa, synthetic construct
MAYFEEIGHPDSKDIRARQESLVCRFEALKEPLATRKKKLL

SEQ ID NO: 1813 - protein, 41 aa, synthetic construct
MDLVPLGDKVTILGETAERLSESHPDATEDLQRQKMELNEA

SEQ ID NO: 1814 - protein, 41 aa, synthetic construct
MGETAERLSESHPDATEDLQRQKMELNEAWEDLQGRTKDRK

SEQ ID NO: 1815 - protein, 41 aa, synthetic construct
MKDQARDLASAGNLLKKHQLLEREMLAREDALKDLNTLAED

SEQ ID NO: 1816 - protein, 41 aa, synthetic construct
MLLEREMLAREDALKDLNTLAEDLLSSGTFNVDQIVKKKDN

SEQ ID NO: 1817 - protein, 41 aa, synthetic construct
MLAREDALKDLNTLAEDLLSSGTFNVDQIVKKKDNVNKRFL

SEQ ID NO: 1818 - protein, 41 aa, synthetic construct
MVRGDCGDTLAATQSLLMKHEALENDFAVHETRVQNVCAQG

SEQ ID NO: 1819 - protein, 41 aa, synthetic construct
MDTLAATQSLLMKHEALENDFAVHETRVQNVCAQGEDILNK

SEQ ID NO: 1820 - protein, 41 aa, synthetic construct
MADSLRLQQLFRDVEDEETWIREKEPIAASTNRGKDLIGVQ

SEQ ID NO: 1821 - protein, 41 aa, synthetic construct
MVEDEETWIREKEPIAASTNRGKDLIGVQNLLKKHQALQAE

SEQ ID NO: 1822 - protein, 41 aa, synthetic construct
MWIREKEPIAASTNRGKDLIGVQNLLKKHQALQAEIAGHEP

SEQ ID NO: 1823 - protein, 41 aa, synthetic construct
MNRGKDLIGVQNLLKKHQALQAEIAGHEPRIKAVTQKGNAM

SEQ ID NO: 1824 - protein, 41 aa, synthetic construct
MLHELNQKWEALKAKASQRRQDLEDSLQAQQYFADANEAES

SEQ ID NO: 1825 - protein, 41 aa, synthetic construct
MKWEALKAKASQRRQDLEDSLQAQQYFADANEAESWMREKE

SEQ ID NO: 1826 - protein, 41 aa, synthetic construct
MAKASQRRQDLEDSLQAQQYFADANEAESWMREKEPIVGST

SEQ ID NO: 1827 - protein, 41 aa, synthetic construct
MRQDLEDSLQAQQYFADANEAESWMREKEPIVGSTDYGKDE

SEQ ID NO: 1828 - protein, 41 aa, synthetic construct
MEQFGQQLLAHGHYASPEIKQKLDILDQERADLEKAWVQRR

SEQ ID NO: 1829 - protein, 41 aa, synthetic construct
MYASPEIKQKLDILDQERADLEKAWVQRRMMLDQCLELQLF

SEQ ID NO: 1830 - protein, 41 aa, synthetic construct
MADISAHEDRLKDLNSQADSLMTSSAFDTSQVKDKRDTING

SEQ ID NO: 1831 - protein, 41 aa, synthetic construct
MEDRLKDLNSQADSLMTSSAFDTSQVKDKRDTINGRFQKIK

SEQ ID NO: 1832 - protein, 41 aa, synthetic construct
MSLMTSSAFDTSQVKDKRDTINGRFQKIKSMAASRRAKLNE

SEQ ID NO: 1833 - protein, 41 aa, synthetic construct
MDTGKKLSDDNTIGKEEIQQRLAQFVEHWKELKQLAAARGQ

SEQ ID NO: 1834 - protein, 41 aa, synthetic construct
MCMVEESGTLESQLEATKRKHQEIRAMRSQLKKIEDLGAAM

SEQ ID NO: 1835 - protein, 41 aa, synthetic construct
MGTLESQLEATKRKHQEIRAMRSQLKKIEDLGAAMEEALIL

SEQ ID NO: 1836 - protein, 41 aa, synthetic construct
MLEATKRKHQEIRAMRSQLKKIEDLGAAMEEALILDNKYTE

SEQ ID NO: 1837 - protein, 41 aa, synthetic construct
MEAQVMKKLRHEKLVQLYAVVSEEPIYIVTEYMSKGSLLDF

SEQ ID NO: 1838 - protein, 41 aa, synthetic construct
MLVQLYAVVSEEPIYIVTEYMSKGSLLDFLKGETGKYLRLP

SEQ ID NO: 1839 - protein, 41 aa, synthetic construct
MVVSEEPIYIVTEYMSKGSLLDFLKGETGKYLRLPQLVDMA

SEQ ID NO: 1840 - protein, 41 aa, synthetic construct
MLNLSINMDNTQRQYEAERNKMIGKRANERLELLLQKRKEL

SEQ ID NO: 1841 - protein, 41 aa, synthetic construct
MQYEAERNKMIGKRANERLELLLQKRKELQENQDEIENMMN

SEQ ID NO: 1842 - protein, 41 aa, synthetic construct
MKHLDALLRQIRNIVEKHTDTDVLEACSKTYHALCNEEFTI

SEQ ID NO: 1843 - protein, 41 aa, synthetic construct
MLRQIRNIVEKHTDTDVLEACSKTYHALCNEEFTIFNRVDI

SEQ ID NO: 1844 - protein, 41 aa, synthetic construct
MIVEKHTDTDVLEACSKTYHALCNEEFTIFNRVDISRSQLI

SEQ ID NO: 1845 - protein, 41 aa, synthetic construct
MLAAFCKLIVYTVVEMNTAADIFKQYMKYYNDYGDIIKETM

SEQ ID NO: 1846 - protein, 41 aa, synthetic construct
MLIVYTVVEMNTAADIFKQYMKYYNDYGDIIKETMSKTRQI

SEQ ID NO: 1847 - protein, 41 aa, synthetic construct
MVEMNTAADIFKQYMKYYNDYGDIIKETMSKTRQIDKIQCA

SEQ ID NO: 1848 - protein, 41 aa, synthetic construct
MSKPSTGKRKVVEGMQLSLTEESSSSDSMWLSREQTLHTPV

SEQ ID NO: 1849 - protein, 41 aa, synthetic construct
MGMQLSLTEESSSSDSMWLSREQTLHTPVMMQTPQLTSTIM

SEQ ID NO: 1850 - protein, 41 aa, synthetic construct
MLDYNRRGTSLMEDDEEPIVEDVMMSSEGRIEDLNEGMDFD

SEQ ID NO: 1851 - protein, 41 aa, synthetic construct
MDDEEPIVEDVMMSSEGRIEDLNEGMDFDTMDIDLPPSKNR

SEQ ID NO: 1852 - protein, 41 aa, synthetic construct
MVILWLFIREQRTQQQRSGPQGIAPVPPPRDLSWEAGHGGN

SEQ ID NO: 1853 - protein, 41 aa, synthetic construct
MIREQRTQQQRSGPQGIAPVPPPRDLSWEAGHGGNVALPLK

SEQ ID NO: 1854 - protein, 41 aa, synthetic construct
MRGTGLTAVAVQEGNSDVVEVRLANRTGGLEVLLNQEVLSF

SEQ ID NO: 1855 - protein, 41 aa, synthetic construct
MAVAVQEGNSDVVEVRLANRTGGLEVLLNQEVLSFTEQSWM

SEQ ID NO: 1856 - protein, 41 aa, synthetic construct
MEVRLANRTGGLEVLLNQEVLSFTEQSWMDLKGMFLSVAAG

SEQ ID NO: 1857 - protein, 41 aa, synthetic construct
MIKRKTFKVDDMLSKVEKMKGEQESHSLSAHLQLTFTGFFH

SEQ ID NO: 1858 - protein, 41 aa, synthetic construct
MKVDDMLSKVEKMKGEQESHSLSAHLQLTFTGFFHKNDKPS

SEQ ID NO: 1859 - protein, 41 aa, synthetic construct
MSKVEKMKGEQESHSLSAHLQLTFTGFFHKNDKPSPNSENE

SEQ ID NO: 1860 - protein, 41 aa, synthetic construct
MKGEQESHSLSAHLQLTFTGFFHKNDKPSPNSENEQNSVTL

SEQ ID NO: 1861 - protein, 41 aa, synthetic construct
MNEFEPSNSHMVKSYSLLFRVTRPGRREFNGMINGETNENI

SEQ ID NO: 1862 - protein, 41 aa, synthetic construct
MNSHMVKSYSLLFRVTRPGRREFNGMINGETNENIDVNEEL

SEQ ID NO: 1863 - protein, 41 aa, synthetic construct
MSYSLLFRVTRPGRREFNGMINGETNENIDVNEELPARRKR

SEQ ID NO: 1864 - protein, 41 aa, synthetic construct
MLMFAKRRERMDQITAQKEEDKVGGTPSREQDAAQTDGLRT

SEQ ID NO: 1865 - protein, 41 aa, synthetic construct
MDAAQTDGLRTTTSYQRKEEESVRTQSSVSKSYIEVSHGLG

SEQ ID NO: 1866 - protein, 41 aa, synthetic construct
MSYQRKEEESVRTQSSVSKSYIEVSHGLGHVPQQNGFSGAS

SEQ ID NO: 1867 - protein, 41 aa, synthetic construct
MQSSVSKSYIEVSHGLGHVPQQNGFSGASETANIQRMVPMN

SEQ ID NO: 1868 - protein, 41 aa, synthetic construct
MKGTVVSSIKIAQPSYPPARPASTLNVAGPFKGPQAAVASQ

SEQ ID NO: 1869 - protein, 41 aa, synthetic construct
MPSYPPARPASTLNVAGPFKGPQAAVASQNYTPKPTVSTPT

SEQ ID NO: 1870 - protein, 41 aa, synthetic construct
MSTPTVNAVQPGAVGPSNELPGMSGRGAQLFAKRQSRMEKY

SEQ ID NO: 1871 - protein, 41 aa, synthetic construct
MAVQPGAVGPSNELPGMSGRGAQLFAKRQSRMEKYVVDSDT

SEQ ID NO: 1872 - protein, 41 aa, synthetic construct
MFGALSQPGPHSVQPLLKHIKKKAKMREQERQASGGGEMFF

SEQ ID NO: 1873 - protein, 41 aa, synthetic construct
MQPLLKHIKKKAKMREQERQASGGGEMFFMRTPQDLTGKDG

SEQ ID NO: 1874 - protein, 41 aa, synthetic construct
MIKKKAKMREQERQASGGGEMFFMRTPQDLTGKDGDLILAE

SEQ ID NO: 1875 - protein, 41 aa, synthetic construct
MDTNTSLSMSRDASVFQDESNMSVLDIPSATPEKQVTQEGE

SEQ ID NO: 1876 - protein, 41 aa, synthetic construct
MSMSRDASVFQDESNMSVLDIPSATPEKQVTQEGEDGDGDL

SEQ ID NO: 1877 - protein, 41 aa, synthetic construct
MGYGGDRSGGGYGGDRGGGYGGDRGGGYGGDRGGGYGGDRG

SEQ ID NO: 1878 - protein, 41 aa, synthetic construct
MSGGGYGGDRGGGYGGDRGGGYGGDRGGGYGGDRGGYGGDR

SEQ ID NO: 1879 - protein, 41 aa, synthetic construct
MGDRGGGYGGDRGGGYGGDRGGGYGGDRGGYGGDRGGGYGG

SEQ ID NO: 1880 - protein, 41 aa, synthetic construct
MEEEGTQRAKTGKDPVVGAGGGGGGGGGGAPPDDLLQDVLS

SEQ ID NO: 1881 - protein, 41 aa, synthetic construct
MLYLPEEDAFWALVQLLASERHSLQGFHSPNGGTVQGLQDQ

SEQ ID NO: 1882 - protein, 41 aa, synthetic construct
MDAFWALVQLLASERHSLQGFHSPNGGTVQGLQDQQEHVVA

SEQ ID NO: 1883 - protein, 41 aa, synthetic construct
MERHSLQGFHSPNGGTVQGLQDQQEHVVATSQPKTMGHQDK

SEQ ID NO: 1884 - protein, 41 aa, synthetic construct
MLAQQQAAAAAAAAAAASQQGSAKNGENTANGEENGAHTIA

SEQ ID NO: 1885 - protein, 41 aa, synthetic construct
MAAAAAAAAAASQQGSAKNGENTANGEENGAHTIANNHTDM

SEQ ID NO: 1886 - protein, 41 aa, synthetic construct
MAAAASQQGSAKNGENTANGEENGAHTIANNHTDMMEVDGD

SEQ ID NO: 1887 - protein, 41 aa, synthetic construct
MHTIANNHTDMMEVDGDVEIPPNKAVVLRGHESEVFICAWN

SEQ ID NO: 1888 - protein, 41 aa, synthetic construct
MHTDMMEVDGDVEIPPNKAVVLRGHESEVFICAWNPVSDLL

SEQ ID NO: 1889 - protein, 41 aa, synthetic construct
MARIWNLSENSTSGSTQLVLRHCIREGGQDVPSNKDVTSLD

SEQ ID NO: 1890 - protein, 41 aa, synthetic construct
MGSTQLVLRHCIREGGQDVPSNKDVTSLDWNSEGTLLATGS

SEQ ID NO: 1891 - protein, 41 aa, synthetic construct
MKQDNCVHDLQAHNKEIYTIKWSPTGPGTNNPNANLMLASA

SEQ ID NO: 1892 - protein, 41 aa, synthetic construct
MHDLQAHNKEIYTIKWSPTGPGTNNPNANLMLASASFDSTV

SEQ ID NO: 1893 - protein, 41 aa, synthetic construct
MNKEIYTIKWSPTGPGTNNPNANLMLASASFDSTVRLWDVD

SEQ ID NO: 1894 - protein, 41 aa, synthetic construct
MKGFRDTGNGRREKRKQLTLQSMRVFDERHKKENGTSDESS

SEQ ID NO: 1895 - protein, 41 aa, synthetic construct
MGNGRREKRKQLTLQSMRVFDERHKKENGTSDESSSEQAAF

SEQ ID NO: 1896 - protein, 41 aa, synthetic construct
MPQTKLLILHQAVAVILSLEQQVRERNLNPKAACLKRREEE

SEQ ID NO: 1897 - protein, 41 aa, synthetic construct
MILHQAVAVILSLEQQVRERNLNPKAACLKRREEEKVSAVS

SEQ ID NO: 1898 - protein, 41 aa, synthetic construct
MAACLKRREEEKVSAVSAEPPTTLPGTHPGLSETTNPMGHM

SEQ ID NO: 1899 - protein, 41 aa, synthetic construct
MAIHVLRSHAVGTAGDMHTLLPGHGALASGFTGPMSLGGRH

SEQ ID NO: 1900 - protein, 41 aa, synthetic construct
MSHAVGTAGDMHTLLPGHGALASGFTGPMSLGGRHAGLVGG

SEQ ID NO: 1901 - protein, 41 aa, synthetic construct
MALASGFTGPMSLGGRHAGLVGGSHPEDGLAGSTSLMHNHA

SEQ ID NO: 1902 - protein, 41 aa, synthetic construct
MQLYPGWSARDNYGKKKKRKRDKQPGETNEHSECFLNPCLS

SEQ ID NO: 1903 - protein, 41 aa, synthetic construct
MSARDNYGKKKKRKRDKQPGETNEHSECFLNPCLSLPPITG

SEQ ID NO: 1904 - protein, 41 aa, synthetic construct
MGKKKKRKRDKQPGETNEHSECFLNPCLSLPPITGEKKSAF

SEQ ID NO: 1905 - protein, 41 aa, synthetic construct
MQLERAREAELQMLLREEAKEMWEKREAEWARERSARDRLM

SEQ ID NO: 1906 - protein, 41 aa, synthetic construct
MVLTGRQQQIQEKIEQNRRAQEESLKHREQLIRNLEEVREL

SEQ ID NO: 1907 - protein, 41 aa, synthetic construct
MQQIQEKIEQNRRAQEESLKHREQLIRNLEEVRELARREKE

SEQ ID NO: 1908 - protein, 41 aa, synthetic construct
MAQEESLKHREQLIRNLEEVRELARREKEESEKLKSARKQE

SEQ ID NO: 1909 - protein, 41 aa, synthetic construct
MSLKIERISSWKTPPQENRDKNLSRRRQDRRATPTGRPTPC

SEQ ID NO: 1910 - protein, 41 aa, synthetic construct
MISSWKTPPQENRDKNLSRRRQDRRATPTGRPTPCAERRGG

SEQ ID NO: 1911 - protein, 41 aa, synthetic construct
MERWEAALRALEGLVYRSPTATREVSVELAKVLLHLEEKTC

SEQ ID NO: 1912 - protein, 41 aa, synthetic construct
MLRALEGLVYRSPTATREVSVELAKVLLHLEEKTCVVGFAG

SEQ ID NO: 1913 - protein, 41 aa, synthetic construct
MFTTSVRSYLPNTVTDALRGSGAWGLLLRRVGDDVLVHLLA

SEQ ID NO: 1914 - protein, 41 aa, synthetic construct
MSYLPNTVTDALRGSGAWGLLLRRVGDDVLVHLLARCALFV

SEQ ID NO: 1915 - protein, 41 aa, synthetic construct
MHNCSGPENPELQILNEQEGKSANYHDKNIVLLKNKAVLMP

SEQ ID NO: 1916 - protein, 41 aa, synthetic construct
MENPELQILNEQEGKSANYHDKNIVLLKNKAVLMPNGATVS

SEQ ID NO: 1917 - protein, 41 aa, synthetic construct
MTTKLASGEEFCSGSSSNLQAPGGSSERYLKQNEMNGAYFK

SEQ ID NO: 1918 - protein, 41 aa, synthetic construct
MGEEFCSGSSSNLQAPGGSSERYLKQNEMNGAYFKQSSVFT

SEQ ID NO: 1919 - protein, 41 aa, synthetic construct
MVNNSNYGWRALRLLARRSPHFFQPTNQQFKSLPEYLENMV

SEQ ID NO: 1920 - protein, 41 aa, synthetic construct
MGWRALRLLARRSPHFFQPTNQQFKSLPEYLENMVIKLAKE

SEQ ID NO: 1921 - protein, 41 aa, synthetic construct
MGEQIEVFANKLGEQWKILAPYLEMKDSEIRQIECDSEDMK

SEQ ID NO: 1922 - protein, 41 aa, synthetic construct
MFANKLGEQWKILAPYLEMKDSEIRQIECDSEDMKMRAKQL

SEQ ID NO: 1923 - protein, 41 aa, synthetic construct
MLAHDEMKSPREPGYKAEGKYKDDPVDLRLDIERRKKHKER

SEQ ID NO: 1924 - protein, 41 aa, synthetic construct
MKSPREPGYKAEGKYKDDPVDLRLDIERRKKHKERDLKRGK

SEQ ID NO: 1925 - protein, 41 aa, synthetic construct
MSWEPCVEVVPNITYQCMELNFYKIPDNLPFSTKNLDLSFN

SEQ ID NO: 1926 - protein, 41 aa, synthetic construct
MEVVPNITYQCMELNFYKIPDNLPFSTKNLDLSFNPLRHLG

SEQ ID NO: 1927 - protein, 41 aa, synthetic construct
  VARIANT 36: note = X can be any amino acid
MLPFALSRGSTEQVGLHWCFVVGRRMGSRTYQLRFXGFYCE

SEQ ID NO: 1928 - protein, 41 aa, synthetic construct
  VARIANT 30: note = X can be any amino acid
MRGSTEQVGLHWCFVVGRRMGSRTYQLRFXGFYCEGCLGDV

SEQ ID NO: 1929 - protein, 41 aa, synthetic construct
  VARIANT 24: note = X can be any amino acid
MVGLHWCFVVGRRMGSRTYQLRFXGFYCEGCLGDVRNVLAV

SEQ ID NO: 1930 - protein, 41 aa, synthetic construct
MEQKRLSNGKLVEEIEQMNNLFQQKQRELVLAVSKVEELTR

SEQ ID NO: 1931 - protein, 41 aa, synthetic construct
MNGKLVEEIEQMNNLFQQKQRELVLAVSKVEELTRQLEMLK

SEQ ID NO: 1932 - protein, 41 aa, synthetic construct
MEIEQMNNLFQQKQRELVLAVSKVEELTRQLEMLKNGRIDS

SEQ ID NO: 1933 - protein, 41 aa, synthetic construct
MFTPQPSKDTLLPPFRKPQTVAASSIYSMYTQQQAPGKNFQ

SEQ ID NO: 1934 - protein, 41 aa, synthetic construct
MIYSMYTQQQAPGKNFQQAVQSALTKTHTRGPHFSSVYGKP

SEQ ID NO: 1935 - protein, 41 aa, synthetic construct
MQQQAPGKNFQQAVQSALTKTHTRGPHFSSVYGKPVIAAAQ

SEQ ID NO: 1936 - protein, 41 aa, synthetic construct
MKNFQQAVQSALTKTHTRGPHFSSVYGKPVIAAAQNQQQHP

SEQ ID NO: 1937 - protein, 41 aa, synthetic construct
MVQSALTKTHTRGPHFSSVYGKPVIAAAQNQQQHPENIYSN

SEQ ID NO: 1938 - protein, 41 aa, synthetic construct
MTQCSQFLYGVQEKMGIMNKGVIYALWDYEPQNDDELPMKE

SEQ ID NO: 1939 - protein, 41 aa, synthetic construct
MLYGVQEKMGIMNKGVIYALWDYEPQNDDELPMKEGDCMTI

SEQ ID NO: 1940 - protein, 41 aa, synthetic construct
MKMGIMNKGVIYALWDYEPQNDDELPMKEGDCMTIIHREDE

SEQ ID NO: 1941 - protein, 41 aa, synthetic construct
MKGVIYALWDYEPQNDDELPMKEGDCMTIIHREDEDEIEWW

SEQ ID NO: 1942 - protein, 41 aa, synthetic construct
MCMTIIHREDEDEIEWWWARLNDKEGYVPRNLLGLYPRIKP

SEQ ID NO: 1943 - protein, 41 aa, synthetic construct
MAQERLATALQKLEEAEKAADESERGMKVIENRALKDEEKM

SEQ ID NO: 1944 - protein, 41 aa, synthetic construct
MTALQKLEEAEKAADESERGMKVIENRALKDEEKMELQEIQ

SEQ ID NO: 1945 - protein, 41 aa, synthetic construct
MEEAEKAADESERGMKVIENRALKDEEKMELQEIQLKEAKH

SEQ ID NO: 1946 - protein, 41 aa, synthetic construct
MQQQNQRLLVALRELGETREREEQETTSSKITELQLKLESA

SEQ ID NO: 1947 - protein, 41 aa, synthetic construct
MLLVALRELGETREREEQETTSSKITELQLKLESALTELEQ

SEQ ID NO: 1948 - protein, 41 aa, synthetic construct
MELGETREREEQETTSSKITELQLKLESALTELEQLRKSRQ

SEQ ID NO: 1949 - protein, 41 aa, synthetic construct
MAVAEVRAENLKKEKEMLKLSEVRLSQQRESLLAEQRGQNL

SEQ ID NO: 1950 - protein, 41 aa, synthetic construct
MLLAEQRGQNLLLTNLQTIQGILERSETETKQRLSSQIEKL

SEQ ID NO: 1951 - protein, 41 aa, synthetic construct
MGQNLLLTNLQTIQGILERSETETKQRLSSQIEKLEHEISH

SEQ ID NO: 1952 - protein, 41 aa, synthetic construct
MQGILERSETETKQRLSSQIEKLEHEISHLKKKLENEVEQR

SEQ ID NO: 1953 - protein, 41 aa, synthetic construct
MSETETKQRLSSQIEKLEHEISHLKKKLENEVEQRHTLTRN

SEQ ID NO: 1954 - protein, 41 aa, synthetic construct
MQRLSSQIEKLEHEISHLKKKLENEVEQRHTLTRNLDVQLL

SEQ ID NO: 1955 - protein, 41 aa, synthetic construct
MIEKLEHEISHLKKKLENEVEQRHTLTRNLDVQLLDTKRQL

SEQ ID NO: 1956 - protein, 41 aa, synthetic construct
MEISHLKKKLENEVEQRHTLTRNLDVQLLDTKRQLDTETNL

SEQ ID NO: 1957 - protein, 41 aa, synthetic construct
MKKLENEVEQRHTLTRNLDVQLLDTKRQLDTETNLHLNTKE

SEQ ID NO: 1958 - protein, 41 aa, synthetic construct
MLKTSTSNVEQYQAMVTSLEESLNKEKQVTEEVRKNIEVRL

SEQ ID NO: 1959 - protein, 41 aa, synthetic construct
MNVEQYQAMVTSLEESLNKEKQVTEEVRKNIEVRLKESAEF

SEQ ID NO: 1960 - protein, 41 aa, synthetic construct
MEESLNKEKQVTEEVRKNIEVRLKESAEFQTQLEKKLMEVE

SEQ ID NO: 1961 - protein, 41 aa, synthetic construct
MEKQVTEEVRKNIEVRLKESAEFQTQLEKKLMEVEKEKQEL

SEQ ID NO: 1962 - protein, 41 aa, synthetic construct
MEVRKNIEVRLKESAEFQTQLEKKLMEVEKEKQELQDDKRR

SEQ ID NO: 1963 - protein, 41 aa, synthetic construct
MAKEQVSKMASVRQHLEETTQKAESQLLECKASWEERERML

SEQ ID NO: 1964 - protein, 41 aa, synthetic construct
MQHLEETTQKAESQLLECKASWEERERMLKDEVSKCVCRCE

SEQ ID NO: 1965 - protein, 41 aa, synthetic construct
MTQKAESQLLECKASWEERERMLKDEVSKCVCRCEDLEKQN

SEQ ID NO: 1966 - protein, 41 aa, synthetic construct
MKEIAETRFEVAQVESLRYRQRVELLERELQELQDSLNAER

SEQ ID NO: 1967 - protein, 41 aa, synthetic construct
MRFEVAQVESLRYRQRVELLERELQELQDSLNAEREKVQVT

SEQ ID NO: 1968 - protein, 41 aa, synthetic construct
MLSRLRQDLQDRTTQEEQLRQQITEKEEKTRKAIVAAKSKI

SEQ ID NO: 1969 - protein, 41 aa, synthetic construct
MDLQDRTTQEEQLRQQITEKEEKTRKAIVAAKSKIAHLAGV

SEQ ID NO: 1970 - protein, 41 aa, synthetic construct
MTQEEQLRQQITEKEEKTRKAIVAAKSKIAHLAGVKDQLTK

SEQ ID NO: 1971 - protein, 41 aa, synthetic construct
MRQQITEKEEKTRKAIVAAKSKIAHLAGVKDQLTKENEELK

SEQ ID NO: 1972 - protein, 41 aa, synthetic construct
MDSTIEASDQVSDDTVEMPLPKKLKSVTPVGTEEEVMAEES

SEQ ID NO: 1973 - protein, 41 aa, synthetic construct
MSDQVSDDTVEMPLPKKLKSVTPVGTEEEVMAEESTDGEVE

SEQ ID NO: 1974 - protein, 41 aa, synthetic construct
MTEEEVMAEESTDGEVETQVYNQDSQDSIGEGVTQGDYTPM

SEQ ID NO: 1975 - protein, 41 aa, synthetic construct
MGVTQGDYTPMEDSEETSQSLQIDLGPLQSDQQTTTSSQDG

SEQ ID NO: 1976 - protein, 41 aa, synthetic construct
MYTPMEDSEETSQSLQIDLGPLQSDQQTTTSSQDGQGKGDD

SEQ ID NO: 1977 - protein, 41 aa, synthetic construct
MSLQIDLGPLQSDQQTTTSSQDGQGKGDDVIVIDSDDEEED

SEQ ID NO: 1978 - protein, 41 aa, synthetic construct
MDSNEGTGSADGNDGYEADDAEGGDGTDPGTETEESMGGGE

SEQ ID NO: 1979 - protein, 41 aa, synthetic construct
MDGYEADDAEGGDGTDPGTETEESMGGGEGNHRAADSQNSG

SEQ ID NO: 1980 - protein, 41 aa, synthetic construct
MDAEGGDGTDPGTETEESMGGGEGNHRAADSQNSGEGNTGA

SEQ ID NO: 1981 - protein, 41 aa, synthetic construct
MEAVGVTSQRPVFCPFHKKEQLKLYCETCDKLTCRDCQLLE

SEQ ID NO: 1982 - protein, 41 aa, synthetic construct
MLTCRDCQLLEHKEHRYQFIEEAFQNQKVIIDTLITKLMEK

SEQ ID NO: 1983 - protein, 41 aa, synthetic construct
MQLLEHKEHRYQFIEEAFQNQKVIIDTLITKLMEKTKYIKF

SEQ ID NO: 1984 - protein, 41 aa, synthetic construct
MEHRYQFIEEAFQNQKVIIDTLITKLMEKTKYIKFTGNQIQ

SEQ ID NO: 1985 - protein, 41 aa, synthetic construct
MIEEAFQNQKVIIDTLITKLMEKTKYIKFTGNQIQNRIIEV

SEQ ID NO: 1986 - protein, 41 aa, synthetic construct
MNFPSGEWICTFCRDLSKPEVEYDCDAPSHNSEKKKTEGLV

SEQ ID NO: 1987 - protein, 41 aa, synthetic construct
MWICTFCRDLSKPEVEYDCDAPSHNSEKKKTEGLVKLTPID

SEQ ID NO: 1988 - protein, 41 aa, synthetic construct
MRDLSKPEVEYDCDAPSHNSEKKKTEGLVKLTPIDKRKCER

SEQ ID NO: 1989 - protein, 41 aa, synthetic construct
MNLFPCVLGSPCFIAGRHYWEVEVGDKAKWTIGVCEDSVCR

SEQ ID NO: 1990 - protein, 41 aa, synthetic construct
MLGSPCFIAGRHYWEVEVGDKAKWTIGVCEDSVCRKGGVTS

SEQ ID NO: 1991 - protein, 41 aa, synthetic construct
MREFASDFEVGECWGYNRFFRLDLLANEGYLNPQNDTVILR

SEQ ID NO: 1992 - protein, 41 aa, synthetic construct
MWGYNRFFRLDLLANEGYLNPQNDTVILRFQVRSPTFFQKS

SEQ ID NO: 1993 - protein, 41 aa, synthetic construct
MVRSPTFFQKSRDQHWYITQLEAAQTSYIQQINNLKERLTI

SEQ ID NO: 1994 - protein, 41 aa, synthetic construct
MGYVGSSSRISRRTHLCSAATSSLLDIDPLILIHLLDLKDR

SEQ ID NO: 1995 - protein, 41 aa, synthetic construct
MSRISRRTHLCSAATSSLLDIDPLILIHLLDLKDRSSIENL

SEQ ID NO: 1996 - protein, 41 aa, synthetic construct
MTHLCSAATSSLLDIDPLILIHLLDLKDRSSIENLWGLQPR

SEQ ID NO: 1997 - protein, 41 aa, synthetic construct
MPEEAFGVLRPVCVQLTKTQTVENVEHLQTRLQAVSDSALQ

SEQ ID NO: 1998 - protein, 41 aa, synthetic construct
MVLRPVCVQLTKTQTVENVEHLQTRLQAVSDSALQELQQYI

SEQ ID NO: 1999 - protein, 41 aa, synthetic construct
MLGFAVSLLLGLAEQEKSKQIKIAALKCLQVLLLQCDCQDH

SEQ ID NO: 2000 - protein, 41 aa, synthetic construct
MLLLGLAEQEKSKQIKIAALKCLQVLLLQCDCQDHPRSLDE

SEQ ID NO: 2001 - protein, 41 aa, synthetic construct
MARHTYLANGQTKVLTQKLSSVRGNHIISGTCASWRGKSLR

SEQ ID NO: 2002 - protein, 41 aa, synthetic construct
MANGQTKVLTQKLSSVRGNHIISGTCASWRGKSLRVQKIRP

SEQ ID NO: 2003 - protein, 41 aa, synthetic construct
MQLYTALWHRRRILMGKIFRTWFEQSPIGRKKQEEPFQEKI

SEQ ID NO: 2004 - protein, 41 aa, synthetic construct
MWHRRRILMGKIFRTWFEQSPIGRKKQEEPFQEKIVVKREV

SEQ ID NO: 2005 - protein, 41 aa, synthetic construct
MDSSVKRRPIVTPGVTGLRNLGNTCYMNSVLQVLSHLLIFR

SEQ ID NO: 2006 - protein, 41 aa, synthetic construct
MRPIVTPGVTGLRNLGNTCYMNSVLQVLSHLLIFRQCFLKL

SEQ ID NO: 2007 - protein, 41 aa, synthetic construct
MLHTLFQVMWSGKWALVSPFAMLHSVWRLIPAFRGYAQQDA

SEQ ID NO: 2008 - protein, 41 aa, synthetic construct
MLPPVTAREAKKIRREMTRTSKWMEMLGEWETYKHSSKLID

SEQ ID NO: 2009 - protein, 41 aa, synthetic construct
MMLGEWETYKHSSKLIDRVYKGIPMNIRGPVWSVLLNIQEI

SEQ ID NO: 2010 - protein, 41 aa, synthetic construct
MWSVLLNIQEIKLKNPGRYQIMKERGKRSSEHIHHIDLDVR

SEQ ID NO: 2011 - protein, 41 aa, synthetic construct
MIQEIKLKNPGRYQIMKERGKRSSEHIHHIDLDVRTTLRNH

SEQ ID NO: 2012 - protein, 41 aa, synthetic construct
MACQRFFRDGLTISFTKILTDEAVSGWKFEIHRCIINNTHR

SEQ ID NO: 2013 - protein, 41 aa, synthetic construct
MRDGLTISFTKILTDEAVSGWKFEIHRCIINNTHRLVELCV

SEQ ID NO: 2014 - protein, 41 aa, synthetic construct
MLDALSKEKAWQTFIIDLLLHCHSKTVRQVAQEQFFLMCTR

SEQ ID NO: 2015 - protein, 41 aa, synthetic construct
MEKAWQTFIIDLLLHCHSKTVRQVAQEQFFLMCTRCCMGHR

SEQ ID NO: 2016 - protein, 41 aa, synthetic construct
MTVRQVAQEQFFLMCTRCCMGHRPLLFFITLLFTVLGSTAR

SEQ ID NO: 2017 - protein, 41 aa, synthetic construct
MQEQFFLMCTRCCMGHRPLLFFITLLFTVLGSTARERAKHS

SEQ ID NO: 2018 - protein, 41 aa, synthetic construct
MEETILEGHLGVTKELLAFQTSEKKFHIGCEKGGANLIKEL

SEQ ID NO: 2019 - protein, 41 aa, synthetic construct
MGHLGVTKELLAFQTSEKKFHIGCEKGGANLIKELIDDFIF

SEQ ID NO: 2020 - protein, 41 aa, synthetic construct
MKELLAFQTSEKKFHIGCEKGGANLIKELIDDFIFPASNVY

SEQ ID NO: 2021 - protein, 41 aa, synthetic construct
MQTSEKKFHIGCEKGGANLIKELIDDFIFPASNVYLQYMRN

SEQ ID NO: 2022 - protein, 41 aa, synthetic construct
MKGDLLEGANAYHCEKCNKKVDTVKRLLIKKLPPVLAIQLK

SEQ ID NO: 2023 - protein, 41 aa, synthetic construct
MGANAYHCEKCNKKVDTVKRLLIKKLPPVLAIQLKRFDYDW

SEQ ID NO: 2024 - protein, 41 aa, synthetic construct
MCEKCNKKVDTVKRLLIKKLPPVLAIQLKRFDYDWERECAI

SEQ ID NO: 2025 - protein, 41 aa, synthetic construct
MGVLVHSGQASGGHYYSYIIQRNGGDGERNRWYKFDDGDVT

SEQ ID NO: 2026 - protein, 41 aa, synthetic construct
MGQASGGHYYSYIIQRNGGDGERNRWYKFDDGDVTECKMDD

SEQ ID NO: 2027 - protein, 41 aa, synthetic construct
MHYYSYIIQRNGGDGERNRWYKFDDGDVTECKMDDDEEMKN

SEQ ID NO: 2028 - protein, 41 aa, synthetic construct
MIQRNGGDGERNRWYKFDDGDVTECKMDDDEEMKNQCFGGE

SEQ ID NO: 2029 - protein, 41 aa, synthetic construct
MDGERNRWYKFDDGDVTECKMDDDEEMKNQCFGGEYMGEVF

SEQ ID NO: 2030 - protein, 41 aa, synthetic construct
MKIDGELKITSVERRSKMDRYAFLLDKALLICKRRGDSYDL

SEQ ID NO: 2031 - protein, 41 aa, synthetic construct
MKITSVERRSKMDRYAFLLDKALLICKRRGDSYDLKDFVNL

SEQ ID NO: 2032 - protein, 41 aa, synthetic construct
MRRSKMDRYAFLLDKALLICKRRGDSYDLKDFVNLHSFQVR

SEQ ID NO: 2033 - protein, 41 aa, synthetic construct
MAIRVTKTVRPFSMVCCPVNENAAALVVSDGRVMIWELKSA

SEQ ID NO: 2034 - protein, 41 aa, synthetic construct
MMVCCPVNENAAALVVSDGRVMIWELKSAVCNRNSRNSSSG

SEQ ID NO: 2035 - protein, 41 aa, synthetic construct
MGLVRNELQLVDLPTGRSIAFRGERGNDESAIEMIKVSHLK

SEQ ID NO: 2036 - protein, 41 aa, synthetic construct
MLQLVDLPTGRSIAFRGERGNDESAIEMIKVSHLKQYLAVV

SEQ ID NO: 2037 - protein, 41 aa, synthetic construct
MPTGRSIAFRGERGNDESAIEMIKVSHLKQYLAVVFRDKPL

SEQ ID NO: 2038 - protein, 41 aa, synthetic construct
MWVRKIRFAPGKGNQKLIAMYNDGAEVWDTKEVQMVSSLRS

SEQ ID NO: 2039 - protein, 41 aa, synthetic construct
MMYNDGAEVWDTKEVQMVSSLRSGRNVTFRILDVDWCTSDK

SEQ ID NO: 2040 - protein, 41 aa, synthetic construct
MGCFFSVAETLHSMRYFDRAALFVEACLKYGAFEVTEDTEK

SEQ ID NO: 2041 - protein, 41 aa, synthetic construct
MAETLHSMRYFDRAALFVEACLKYGAFEVTEDTEKLITAIY

SEQ ID NO: 2042 - protein, 41 aa, synthetic construct
MAALFVEACLKYGAFEVTEDTEKLITAIYADYARSLKNLGF

SEQ ID NO: 2043 - protein, 41 aa, synthetic construct
MEFMHETHDGVQDMACDTFIKIAQKCRRHFVQVQVGEVMPF

SEQ ID NO: 2044 - protein, 41 aa, synthetic construct
MHDGVQDMACDTFIKIAQKCRRHFVQVQVGEVMPFIDEILN

SEQ ID NO: 2045 - protein, 41 aa, synthetic construct
MAIIVNKLGGHITAEIPQIFDAVFECTLNMINKDFEEYPEH

SEQ ID NO: 2046 - protein, 41 aa, synthetic construct
MLGGHITAEIPQIFDAVFECTLNMINKDFEEYPEHRTNFFL

SEQ ID NO: 2047 - protein, 41 aa, synthetic construct
MAEIPQIFDAVFECTLNMINKDFEEYPEHRTNFFLLLQAVN

SEQ ID NO: 2048 - protein, 41 aa, synthetic construct
MEEAAAQSFYQTYFCDILQHIFSVVTDTSHTAGLTMHASIL

SEQ ID NO: 2049 - protein, 41 aa, synthetic construct
MSFYQTYFCDILQHIFSVVTDTSHTAGLTMHASILAYMFNL

SEQ ID NO: 2050 - protein, 41 aa, synthetic construct
MFCDILQHIFSVVTDTSHTAGLTMHASILAYMFNLVEEGKI

SEQ ID NO: 2051 - protein, 41 aa, synthetic construct
MISDDKIFTDIFHYLEVLFRIIKPRKVFFMAVDGVAPRAKM

SEQ ID NO: 2052 - protein, 41 aa, synthetic construct
MFTDIFHYLEVLFRIIKPRKVFFMAVDGVAPRAKMNQQRGR

SEQ ID NO: 2053 - protein, 41 aa, synthetic construct
MRIIKPRKVFFMAVDGVAPRAKMNQQRGRRFRSAKEAEDKI

SEQ ID NO: 2054 - protein, 41 aa, synthetic construct
MFMARLHEHLKYFVNMKISTDKSWQGVTIYFSGHETPGEGE

SEQ ID NO: 2055 - protein, 41 aa, synthetic construct
MEHLKYFVNMKISTDKSWQGVTIYFSGHETPGEGEHKIMEF

SEQ ID NO: 2056 - protein, 41 aa, synthetic construct
MRHCLYGLDADLIMLGLTSHEAHFSLLREEVRFGGKKTQRV

SEQ ID NO: 2057 - protein, 41 aa, synthetic construct
MLDADLIMLGLTSHEAHFSLLREEVRFGGKKTQRVCAPEET

SEQ ID NO: 2058 - protein, 41 aa, synthetic construct
MHEAHFSLLREEVRFGGKKTQRVCAPEETTFHLLHLSLMRE

SEQ ID NO: 2059 - protein, 41 aa, synthetic construct
MERKRNQHSECLMCWYDRDTEFIYPSPWPEKFPAIERCCTR

SEQ ID NO: 2060 - protein, 41 aa, synthetic construct
MCWYDRDTEFIYPSPWPEKFPAIERCCTRYKIISLDAWRVD

SEQ ID NO: 2061 - protein, 41 aa, synthetic construct
MTEFIYPSPWPEKFPAIERCCTRYKIISLDAWRVDINKNKI

SEQ ID NO: 2062 - protein, 41 aa, synthetic construct
MSPWPEKFPAIERCCTRYKIISLDAWRVDINKNKITRIDQK

SEQ ID NO: 2063 - protein, 41 aa, synthetic construct
MVFMLGTPYYGCTGEVQDSGDVITEGRIRVIFSIPCEPNLD

SEQ ID NO: 2064 - protein, 41 aa, synthetic construct
MPYYGCTGEVQDSGDVITEGRIRVIFSIPCEPNLDALIQNQ

SEQ ID NO: 2065 - protein, 41 aa, synthetic construct
MGEVQDSGDVITEGRIRVIFSIPCEPNLDALIQNQHKYSIK

SEQ ID NO: 2066 - protein, 41 aa, synthetic construct
MGDVITEGRIRVIFSIPCEPNLDALIQNQHKYSIKYNPGYV

SEQ ID NO: 2067 - protein, 41 aa, synthetic construct
MQLLAEYLERAPELFSYIAKNSQEDVFYEDDIWPGENENGA

SEQ ID NO: 2068 - protein, 41 aa, synthetic construct
MLERAPELFSYIAKNSQEDVFYEDDIWPGENENGAEKVQEI

SEQ ID NO: 2069 - protein, 41 aa, synthetic construct
MLFSYIAKNSQEDVFYEDDIWPGENENGAEKVQEIITWLKG

SEQ ID NO: 2070 - protein, 41 aa, synthetic construct
MKNSQEDVFYEDDIWPGENENGAEKVQEIITWLKGHPVSTL

SEQ ID NO: 2071 - protein, 41 aa, synthetic construct
MVNQHHKSGFNDNSVKYQQRKHDPHRKFKEECKSPKAECWS

SEQ ID NO: 2072 - protein, 41 aa, synthetic construct
MSVKYQQRKHDPHRKFKEECKSPKAECWSQKMSNKQPNSGI

SEQ ID NO: 2073 - protein, 41 aa, synthetic construct
MRKHDPHRKFKEECKSPKAECWSQKMSNKQPNSGIENFLAS

SEQ ID NO: 2074 - protein, 41 aa, synthetic construct
MRKFKEECKSPKAECWSQKMSNKQPNSGIENFLASLNISKE

SEQ ID NO: 2075 - protein, 41 aa, synthetic construct
MCKSPKAECWSQKMSNKQPNSGIENFLASLNISKENEVQSS

SEQ ID NO: 2076 - protein, 41 aa, synthetic construct
MAPVKQPPPLAPQSPQGGVMGGSNSNQQQQMRLQQLQMEKE

SEQ ID NO: 2077 - protein, 41 aa, synthetic construct
MPPLAPQSPQGGVMGGSNSNQQQQMRLQQLQMEKERLRLKQ

SEQ ID NO: 2078 - protein, 41 aa, synthetic construct
MPFGGSSGVTPFGGASSSFSVVPSSYPAGLTGGVTIFVALY

SEQ ID NO: 2079 - protein, 41 aa, synthetic construct
MGVTPFGGASSSFSVVPSSYPAGLTGGVTIFVALYDYEART

SEQ ID NO: 2080 - protein, 41 aa, synthetic construct
MSVVPSSYPAGLTGGVTIFVALYDYEARTTEDLSFKKGERF

SEQ ID NO: 2081 - protein, 41 aa, synthetic construct
MNYVAPADSIQAEEWYFGKMGRKDAERLLLNPGNQRGIFLV

SEQ ID NO: 2082 - protein, 41 aa, synthetic construct
MDSIQAEEWYFGKMGRKDAERLLLNPGNQRGIFLVRESETT

SEQ ID NO: 2083 - protein, 41 aa, synthetic construct
MEWYFGKMGRKDAERLLLNPGNQRGIFLVRESETTKGAYSL

SEQ ID NO: 2084 - protein, 41 aa, synthetic construct
MLYGRFTIKSDVWSFGILQTELVTKGRVPYPGMVNREVLEQ

SEQ ID NO: 2085 - protein, 41 aa, synthetic construct
MSFGILQTELVTKGRVPYPGMVNREVLEQVERGYRMPCPQG

SEQ ID NO: 2086 - protein, 41 aa, synthetic construct
MQTHTGTDMAVFCLLCGKRFQAQSALQQHMEVHAGVRSYIC

SEQ ID NO: 2087 - protein, 41 aa, synthetic construct
MFQAQSALQQHMEVHAGVRSYICSECNRTFPSHTALKRHLR

SEQ ID NO: 2088 - protein, 41 aa, synthetic construct
MEKPYECNGCGKKFSLKHQLETHYRVHTGEKPFECKLCHQR

SEQ ID NO: 2089 - protein, 41 aa, synthetic construct
MNGCGKKFSLKHQLETHYRVHTGEKPFECKLCHQRSRDYSA

SEQ ID NO: 2090 - protein, 41 aa, synthetic construct
MSFSLKDYLIKHMVTHTGVRAYQCSICNKRFTQKSSLNVHM

SEQ ID NO: 2091 - protein, 41 aa, synthetic construct
MYLIKHMVTHTGVRAYQCSICNKRFTQKSSLNVHMRLHRGE

SEQ ID NO: 2092 - protein, 41 aa, synthetic construct
MTLASQPYVYEIDFVQPEALAAILEFAYTSTLTITAGNVKH

SEQ ID NO: 2093 - protein, 41 aa, synthetic construct
MYVYEIDFVQPEALAAILEFAYTSTLTITAGNVKHILNAAR

SEQ ID NO: 2094 - protein, 41 aa, synthetic construct
MFAYTSTLTITAGNVKHILNAARMLEIQCIVNVCLEIMEPG

SEQ ID NO: 2095 - protein, 41 aa, synthetic construct
MNAARMLEIQCIVNVCLEIMEPGGDGGEEDDKEDDDDDEDD

SEQ ID NO: 2096 - protein, 41 aa, synthetic construct
MRLAALKDERQGSIPSTQEMEARLAALQGRVLPSQTPQPAH

SEQ ID NO: 2097 - protein, 41 aa, synthetic construct
MDERQGSIPSTQEMEARLAALQGRVLPSQTPQPAHHTPDTR

SEQ ID NO: 2098 - protein, 41 aa, synthetic construct
MPDTRTQAQQTQDLLTQLAAEVAIDESWKGGGPAASLQNDL

SEQ ID NO: 2099 - protein, 41 aa, synthetic construct
MAEVAIDESWKGGGPAASLQNDLNQGGPGSTNSKRQANWSL

SEQ ID NO: 2100 - protein, 41 aa, synthetic construct
MGTLKERVQWRGEMKHFCDQHCLLRFYCQQNEPNMTTQKGP

SEQ ID NO: 2101 - protein, 41 aa, synthetic construct
MVQWRGEMKHFCDQHCLLRFYCQQNEPNMTTQKGPENLHYD

SEQ ID NO: 2102 - protein, 41 aa, synthetic construct
MHSLFSGKPEVLDWQDQVFQFCCRDCCEDFKRLRGVVSQCE

SEQ ID NO: 2103 - protein, 41 aa, synthetic construct
MKPEVLDWQDQVFQFCCRDCCEDFKRLRGVVSQCEHCRQEK

SEQ ID NO: 2104 - protein, 41 aa, synthetic construct
MWQDQVFQFCCRDCCEDFKRLRGVVSQCEHCRQEKLLHEKL

SEQ ID NO: 2105 - protein, 41 aa, synthetic construct
MGRGFSQKSNLVAHQRTHSGERPYVCRECGRGFSHQAGLIR

SEQ ID NO: 2106 - protein, 41 aa, synthetic construct
MHQRTHSGERPYVCRECGRGFSHQAGLIRHKRKHSREKPYM

SEQ ID NO: 2107 - protein, 41 aa, synthetic construct
MGLIRHKRKHSREKPYMCRQCGLGFGNKSALITHKRAHSEE

SEQ ID NO: 2108 - protein, 41 aa, synthetic construct
MRKHSREKPYMCRQCGLGFGNKSALITHKRAHSEEKPCVCR

SEQ ID NO: 2109 - protein, 41 aa, synthetic construct
MEVIHTGTLQRQASYHIGAFCSQEIEKDIHDFVFQWQEDET

SEQ ID NO: 2110 - protein, 41 aa, synthetic construct
MSYHIGAFCSQEIEKDIHDFVFQWQEDETNDHEAPMTEIKK

SEQ ID NO: 2111 - protein, 41 aa, synthetic construct
MSSTDRYDQRHAGNKPIKGQLESRFHLHLRRHRRIHTGEKP

SEQ ID NO: 2112 - protein, 41 aa, synthetic construct
MDQRHAGNKPIKGQLESRFHLHLRRHRRIHTGEKPYKCEEC

SEQ ID NO: 2113 - protein, 41 aa, synthetic construct
MNKPIKGQLESRFHLHLRRHRRIHTGEKPYKCEECEKVFSC

SEQ ID NO: 2114 - protein, 41 aa, synthetic construct
MQLESRFHLHLRRHRRIHTGEKPYKCEECEKVFSCKSHLEI

SEQ ID NO: 2115 - protein, 41 aa, synthetic construct
MHLHLRRHRRIHTGEKPYKCEECEKVFSCKSHLEIHRIIHT

SEQ ID NO: 2116 - protein, 41 aa, synthetic construct
MVIHKAVHTAEKPYKCNECGKVFKQRATLAGHRRVHTGEKP

SEQ ID NO: 2117 - protein, 41 aa, synthetic construct
MHTAEKPYKCNECGKVFKQRATLAGHRRVHTGEKPYRCEEC

SEQ ID NO: 2118 - protein, 41 aa, synthetic construct
MGEKPYRCEECDKVFSRKSHLERHRRIHTGEKPYKCKVCDK

SEQ ID NO: 2119 - protein, 41 aa, synthetic construct
MCEECDKVFSRKSHLERHRRIHTGEKPYKCKVCDKAFRSDS

SEQ ID NO: 2120 - protein, 41 aa, synthetic construct
MVFSRKSHLERHRRIHTGEKPYKCKVCDKAFRSDSRLAEHQ

SEQ ID NO: 2121 - protein, 41 aa, synthetic construct
MHLERHRRIHTGEKPHKCGDCGKAFNSPSHLIRHQRIHTGQ

SEQ ID NO: 2122 - protein, 41 aa, synthetic construct
MRIHTGEKPHKCGDCGKAFNSPSHLIRHQRIHTGQKSYKCH

SEQ ID NO: 2123 - protein, 41 aa, synthetic construct
MTLTEHKVTHSKSLDTGNCRICKMPLQSEEEFLEHCQMHPD

SEQ ID NO: 2124 - protein, 41 aa, synthetic construct
MVTHSKSLDTGNCRICKMPLQSEEEFLEHCQMHPDLRNSLT

SEQ ID NO: 2125 - protein, 41 aa, synthetic construct
MPVSALHQFAQMQRVQLDLKETVTTGNVMGPYFAFCAVVDG

SEQ ID NO: 2126 - protein, 41 aa, synthetic construct
MECMHKLGNSCEFRLLSKEGPAHEPKFQYCVAVGAQTFPSV

SEQ ID NO: 2127 - protein, 41 aa, synthetic construct
MFPAVCAHSKKQGKQEAADAALRVLIGENEKAERMGFTEVT

SEQ ID NO: 2128 - protein, 41 aa, synthetic construct
MSKVTRAQIEDTLRRDHQLREAPDTAEKAKSHLEVPLEENV

SEQ ID NO: 2129 - protein, 41 aa, synthetic construct
MRRDHQLREAPDTAEKAKSHLEVPLEENVNRRVLEEGSVEA

SEQ ID NO: 2130 - protein, 41 aa, synthetic construct
MSESGNSARSSGISSQNSSTSDGDRSVSSQSSSSVSSQVTT

SEQ ID NO: 2131 - protein, 41 aa, synthetic construct
MQPQTTINKEQFSKRKNDTLDPELFVECTECGRKMHQICVL

SEQ ID NO: 2132 - protein, 41 aa, synthetic construct
MDTLDPELFVECTECGRKMHQICVLHHEIIWPAGFVCDGCL

SEQ ID NO: 2133 - protein, 41 aa, synthetic construct
MDTKKCAFRTHTGKYWTLTATGGVQSTASSKNASCYFDIEW

SEQ ID NO: 2134 - protein, 41 aa, synthetic construct
MSKNASCYFDIEWRDRRITLRASNGKFVTSKKNGQLAASVE

SEQ ID NO: 2135 - protein, 41 aa, synthetic construct
MVFQLEFNDGAYNIKDSTGKYWTVGSDSAVTSSGDTPVDFF

SEQ ID NO: 2136 - protein, 41 aa, synthetic construct
MKVPAVPVQWGNCGDTGTRSAGPLRRNYNFIAAVVEKVAPS

SEQ ID NO: 2137 - protein, 41 aa, synthetic construct
MKKNIAAERKEAKQEKEEADRYQRLKDEVVRAQVQLQLFKL

SEQ ID NO: 2138 - protein, 41 aa, synthetic construct; identical to SEQ ID NO: 1752

SEQ ID NO: 2139 - protein, 41 aa, synthetic construct
MKEHMDAINHDTKELEKMTNRQGMLLKKKEECMKKIRELGS

SEQ ID NO: 2140 - protein, 41 aa, synthetic construct
MSQHRKKEADSVYGEWVPVEKNGEENKDDDNVFSSNLPSEP

SEQ ID NO: 2141 - protein, 41 aa, synthetic construct
MKMHNSEISKRLGAEWKLLSETEKRPFIDEAKRLRALHMKE

SEQ ID NO: 2142 - protein, 41 aa, synthetic construct
MLPERLEVNGRESEEENLNKSEISQVFEIALKRNLPVNFEV

SEQ ID NO: 2143 - protein, 41 aa, synthetic construct
MNKSEISLVFEIALKRNMPVSFEVIKESGPPHMKSFVTRVS

SEQ ID NO: 2144 - protein, 41 aa, synthetic construct
METVSSNSSNNTGNSTTETSSTLEVRTQGPILTASGKNPVM

SEQ ID NO: 2145 - protein, 41 aa, synthetic construct
MGELSSADEKRYRALKRTAERELLMNADVICCTCVGAGDPR

SEQ ID NO: 2146 - protein, 41 aa, synthetic construct
MLRYFDEKELELMLCGMQEIDMSDWQKSTIYRHYTKNSKQI

SEQ ID NO: 2147 - protein, 41 aa, synthetic construct
MWDSIIQQATKNVDILKDPETVKQLGSILKTNVRACKAVGH

SEQ ID NO: 2148 - protein, 41 aa, synthetic construct
MASLQISPQPRPWRPLPAQAQSAWGPAPAPATYRAEGGWPQ

SEQ ID NO: 2149 - protein, 41 aa, synthetic construct
MGQQLHDCHGLVIARRALLRFLFRQLLLATQGGPKGKEQSV

SEQ ID NO: 2150 - protein, 41 aa, synthetic construct
MHDCHGLVIARRALLRFLFRQLLLATQGGPKGKEQSVLAPQ

SEQ ID NO: 2151 - protein, 41 aa, synthetic construct
MGLVIARRALLRFLFRQLLLATQGGPKGKEQSVLAPQPGPG

SEQ ID NO: 2152 - protein, 41 aa, synthetic construct
MCLSASDKLARWAVLGLGGALLAHLVSPLYSTSLILADSCH

SEQ ID NO: 2153 - protein, 41 aa, synthetic construct
MGPPSRLCKASFLRAFHQAARAVGKPYLLALKTYEAAKAGP

SEQ ID NO: 2154 - protein, 41 aa, synthetic construct
MCLSSHFQELSIYQDQEQRILKFLEELGEGKATTAHDLSGK

SEQ ID NO: 2155 - protein, 41 aa, synthetic construct
MRNAEFLTCNIPTSNASNNMVTTEKVENGQEPVIKLENRQE

SEQ ID NO: 2156 - protein, 41 aa, synthetic construct
MRFLYSELMKYNSQTAKDSIFEPAKGGEKLQIKKTVSFHLY

SEQ ID NO: 2157 - protein, 41 aa, synthetic construct
MEPAKGGEKLQIKKTVSFHLYISTAPCGDGALFDKSCSDRA

SEQ ID NO: 2158 - protein, 41 aa, synthetic construct
MTWDGVLQGERLLTMSCSDKIARWNVVGIQGSLLSIFVEPI

SEQ ID NO: 2159 - protein, 41 aa, synthetic construct
MVLQGERLLTMSCSDKIARWNVVGIQGSLLSIFVEPIYFSS

SEQ ID NO: 2160 - protein, 41 aa, synthetic construct
MQAHLAMGGGPGPGTDFTSDQADFPDTLFQEFEPPAPRPGL

SEQ ID NO: 2161 - protein, 41 aa, synthetic construct
MFSSRGINFRTRHLMQDLRMLMPHSKADTKMDRKDKLFVIN

SEQ ID NO: 2162 - protein, 41 aa, synthetic construct
MRPFQALPREQSPPPPLQTSSGAEVMDVGSGGDGQSELPAE

SEQ ID NO: 2163 - protein, 41 aa, synthetic construct
MMGGPLPPHLALKAENNSEVGASGYGVPGPTWDRGANLKDY

SEQ ID NO: 2164 - protein, 41 aa, synthetic construct
MGFRGNSGGDYRGPSGGYRGSGGFQRGGGRGAYGTGYFGQG

SEQ ID NO: 2165 - protein, 41 aa, synthetic construct
MVGEYSNLEVNASWTKERWNQEFTKHQVLIMTCYVALNVLK

SEQ ID NO: 2166 - protein, 41 aa, synthetic construct
MPYERQQFESVEWYNNRNQDNYVSWSDSEDDDEDEEIEEKE

SEQ ID NO: 2167 - protein, 41 aa, synthetic construct
MCYYVFGDLSGGCESYLVNLSLNDNDGSSGASDQDTLAPLP

SEQ ID NO: 2168 - protein, 41 aa, synthetic construct
MVISTFKKRAVEITGAGPGASSVCNSAPGSGPSSPNSSHST

SEQ ID NO: 2169 - protein, 41 aa, synthetic construct
MFKKRAVEITGAGPGASSVCNSAPGSGPSSPNSSHSTIAEN

SEQ ID NO: 2170 - protein, 41 aa, synthetic construct
MAVEITGAGPGASSVCNSAPGSGPSSPNSSHSTIAENGFTG

SEQ ID NO: 2171 - protein, 41 aa, synthetic construct
MVYQAPLSLATVPHQALGRTQSSPAAPGGMKSPPDQPVKHL

SEQ ID NO: 2172 - protein, 41 aa, synthetic construct
MVLQSALAAIRHARWFEENASQSTVKVLIRLLKDLRIRFPG

SEQ ID NO: 2173 - protein, 41 aa, synthetic construct
MALAAIRHARWFEENASQSTVKVLIRLLKDLRIRFPGFEPL

SEQ ID NO: 2174 - protein, 41 aa, synthetic construct
MPLRGWPLELLCEKSIGTANRPMGAGEALRRVLECLASGIV

SEQ ID NO: 2175 - protein, 41 aa, synthetic construct
MESTIVEPKQNENRLSDTKPNDNKQNNGRSETTKSRPETPK

SEQ ID NO: 2176 - protein, 41 aa, synthetic construct
MGRRSSGGGRYRNRSPSDSDMEDYSPPPSLSEVARKMKKKE

SEQ ID NO: 2177 - protein, 41 aa, synthetic construct
MSILARLDMQRGVHGRLMDNSTSVREAAVELLGRFVLCRPQ

SEQ ID NO: 2178 - protein, 41 aa, synthetic construct
MGLSPSIDTLDHIRALDRLQEVPHEGPMCDLLWSDPDDRGG

SEQ ID NO: 2179 - protein, 41 aa, synthetic construct
MKTPIQVLHEYGMKTKNIPVYECERSDVQIHVPTFTFRVTV

SEQ ID NO: 2180 - protein, 41 aa, synthetic construct
MQVEQMEIPPVELPPEEPPNICQLIPELELLPEKEKEKEKE

SEQ ID NO: 2181 - protein, 41 aa, synthetic construct
MTFESARPTQTHMALVQLERVGLLRFLVSQNVDGLHVRSGF

SEQ ID NO: 2182 - protein, 41 aa, synthetic construct
MARPTQTHMALVQLERVGLLRFLVSQNVDGLHVRSGFPRDK

SEQ ID NO: 2183 - protein, 41 aa, synthetic construct
MLERVGLLRFLVSQNVDGLHVRSGFPRDKLAELHGNMFVEE

SEQ ID NO: 2184 - protein, 41 aa, synthetic construct
MLANFGPRINDIKRIIQSREREMKDLKEKMNQVEDEVFEEF

SEQ ID NO: 2185 - protein, 41 aa, synthetic construct
MVMNLLESAGFSRSNPYYIVKQGKINQMATAPDSQRLKLLR

SEQ ID NO: 2186 - protein, 41 aa, synthetic construct
MLEQCNTELKKYSHVNKKALDQFVNFSEQKEKLIKRQEELD

SEQ ID NO: 2187 - protein, 41 aa, synthetic construct
MARVPLAGAAGGPGIGRAAGRGIPAGVPMPQAPAGLAGPVR

SEQ ID NO: 2188 - protein, 41 aa, synthetic construct
MGIGRAAGRGIPAGVPMPQAPAGLAGPVRGVGGPSQQVMTP

SEQ ID NO: 2189 - protein, 41 aa, synthetic construct
MPPPKDTGIARVPLAGAAGGPGVGRAAGRGVPAGVPIPQAP

SEQ ID NO: 2190 - protein, 41 aa, synthetic construct
MDTGIARVPLAGAAGGPGVGRAAGRGVPAGVPIPQAPAGLA

SEQ ID NO: 2191 - protein, 41 aa, synthetic construct
MLAGAAGGPGVGRAAGRGVPAGVPIPQAPAGLAGPVRGVGG

SEQ ID NO: 2192 - protein, 41 aa, synthetic construct
MQQGTPGMALGSMGSVVKSEASSSPPVVTSSSHSRAPCQAG

SEQ ID NO: 2193 - protein, 41 aa, synthetic construct
MIIYDEYMMDTVISLLTGLSDSQVRAFRHTSTLAAMKLMTA

SEQ ID NO: 2194 - protein, 41 aa, synthetic construct
MDTVISLLTGLSDSQVRAFRHTSTLAAMKLMTALVNVALNL

SEQ ID NO: 2195 - protein, 41 aa, synthetic construct
MSLLTGLSDSQVRAFRHTSTLAAMKLMTALVNVALNLSIHQ

SEQ ID NO: 2196 - protein, 41 aa, synthetic construct
MSQVRAFRHTSTLAAMKLMTALVNVALNLSIHQDNTQRQYE

SEQ ID NO: 2197 - protein, 41 aa, synthetic construct
MNMMLFEVVKMGKSAMQSVVDDWIESYKHDRDIALLDLINF

SEQ ID NO: 2198 - protein, 41 aa, synthetic construct
MIQDPAQAEAYTIYWLVAALAPLVAAPPRPSQGRLAGREWS

SEQ ID NO: 2199 - protein, 41 aa, synthetic construct
MVVLLCRQPCASQSSLKDINWDSSQWQPLIQDRCFLSWLVK

SEQ ID NO: 2200 - protein, 41 aa, synthetic construct
MKECVDHLSRDEDEEKLVASLWGAERCLRVLESVTVHNPEN

SEQ ID NO: 2201 - protein, 41 aa, synthetic construct
MAPVAAHTVTAAYAPAAATVAVARPAPVAVAAAATAAAYGG

SEQ ID NO: 2202 - protein, 41 aa, synthetic construct
MSGTSYSGYEAAVYSAASSYYQQQQQQQKQAAAAAAAAAAT

SEQ ID NO: 2203 - protein, 41 aa, synthetic construct
MYSGYEAAVYSAASSYYQQQQQQQKQAAAAAAAAAATAAWT

SEQ ID NO: 2204 - protein, 41 aa, synthetic construct
MCSFNDPNAKEMHLKGRRHRLQYKKKVNPDLQVEVKPSIRA

SEQ ID NO: 2205 - protein, 41 aa, synthetic construct
MQVTISVTSPLMREDPSTDPGVEEPQADAGDVLSPKKCLES

SEQ ID NO: 2206 - protein, 41 aa, synthetic construct
MVEKAVSSAAGPLGPGDAVRRVLECVATGTLLTDGPGLQDP

SEQ ID NO: 2207 - protein, 41 aa, synthetic construct
MVSSAAGPLGPGDAVRRVLECVATGTLLTDGPGLQDPCERD

SEQ ID NO: 2208 - protein, 41 aa, synthetic construct
MAGPLGPGDAVRRVLECVATGTLLTDGPGLQDPCERDQTDA

SEQ ID NO: 2209 - protein, 41 aa, synthetic construct
MGPGDAVRRVLECVATGTLLTDGPGLQDPCERDQTDALEPM

SEQ ID NO: 2210 - protein, 41 aa, synthetic construct
MAVRRVLECVATGTLLTDGPGLQDPCERDQTDALEPMTLQE

SEQ ID NO: 2211 - protein, 41 aa, synthetic construct
MKFLEELGEGKATTAHDLSGKLGTPKKEINRVLYSLAKKGK

SEQ ID NO: 2212 - protein, 41 aa, synthetic construct
MAWANHVFLGCRYPQKVMDKILSMAEGIKVTDAPTYTTRDE

SEQ ID NO: 2213 - protein, 41 aa, synthetic construct
MLTKELSYQIRGDFSRNGKRTVFLVNSANQVAQQVSAVRTH

SEQ ID NO: 2214 - protein, 41 aa, synthetic construct
MCLKIPPRCMFDHPDADKTLNHLISGFENFEKKINYRFKNK

SEQ ID NO: 2215 - protein, 41 aa, synthetic construct
MLFHVIDDFVQFQLEKNEMQGMDSELRRSEEDEEKEEDIEV

SEQ ID NO: 2216 - protein, 41 aa, synthetic construct
MKQAAMERSEKAKQLRALRKYGKKVQTEVLQKRQQEKAHMM

SEQ ID NO: 2217 - protein, 41 aa, synthetic construct
MESANNRAEYYHLLAEKIYKIQKELEEKRRTRLQKQNMLPN

SEQ ID NO: 2218 - protein, 41 aa, synthetic construct
MKMEVDQPEPADTQPEDISESKVEDCKMESTETEERSTELK

SEQ ID NO: 2219 - protein, 41 aa, synthetic construct
MPEETEEELTEQQEVLLGEGALTMPREGSTESESTQEDLEE

SEQ ID NO: 2220 - protein, 41 aa, synthetic construct
MDTVWNEMHSSSAVRMAVGCLLELAFKVAAGELKNGFAIIR

SEQ ID NO: 2221 - protein, 41 aa, synthetic construct
MFPGSGAPEEVGGGPGVGYNVNVAWTGGVDPPIGDVEYLTA

SEQ ID NO: 2222 - protein, 41 aa, synthetic construct
MGNKIRPIKASVITQVFHVPLEERKYKDMNQFGEGEQAKIC

SEQ ID NO: 2223 - protein, 41 aa, synthetic construct
MVIVTPSEKAYEKPPEKKEGEEEEENTEEPPQGEEEESMET

SEQ ID NO: 2224 - protein, 41 aa, synthetic construct
MPVSVLQEDIVGSLKSTPENHPETPKKKSDPELSKSEMKQS

SEQ ID NO: 2225 - protein, 41 aa, synthetic construct
MRYRNRSPSDSDMEDYSPPPSLSEVARKMKKKEKQKKRKAY

SEQ ID NO: 2226 - protein, 41 aa, synthetic construct
MQGEPARVRCSHLLVKHSQSRRPSSWRQEKITRTKEEALEL

SEQ ID NO: 2227 - protein, 41 aa, synthetic construct
MDEDDNVSMGGPDSPDSVDPVEPMPTMTDQTTLVPNEEEAF

SEQ ID NO: 2228 - protein, 41 aa, synthetic construct
MLREIEENQKRIEKLEEYITTSKQSLEEQKKLEGELTEEVE

SEQ ID NO: 2229 - protein, 41 aa, synthetic construct
MLEEQKKLEGELTEEVEMAKRRIDEINKELNQVMEQLGDAR

SEQ ID NO: 2230 - protein, 41 aa, synthetic construct
MGRDCIQYIKEQRGEPETFLPLDYLEVKPTDEKLRELKGAK

SEQ ID NO: 2231 - protein, 41 aa, synthetic construct
MQLARAFTMDCITLEGDQVSHRGALTGGYYDTRKSRLELQK

SEQ ID NO: 2232 - protein, 41 aa, synthetic construct
MLLSQLSLEDQKRVDALNDEIRQLQQENRQLLNERIKLEGI

SEQ ID NO: 2233 - protein, 41 aa, synthetic construct; identical to SEQ ID NO: 2139

SEQ ID NO: 2234 - protein, 41 aa, synthetic construct
MKALDQFVNFSEQKEKLIKRQEELDRGYKSIMELMNVLELR

SEQ ID NO: 2235 - protein, 41 aa, synthetic construct
MGKRKRGRPGRPPSTNKKPRKSPGEKSRIEAGIRGAGRGRA

SEQ ID NO: 2236 - protein, 41 aa, synthetic construct
MLLSFVMDHVFIDQDEENQSMEGDEEDEANKIEALHKRRNL

SEQ ID NO: 2237 - protein, 41 aa, synthetic construct
MDFLHNRGLMEEDAEPIFEDVMMSSRSQLEDMNEEFEDTMV

SEQ ID NO: 2238 - protein, 41 aa, synthetic construct
MSSGHVPHGPLTRPSEQLDYLSRVQGFQVEYKDFPKNNKNE

SEQ ID NO: 2239 - protein, 41 aa, synthetic construct
MSVDVDGTTYEASGPSKKTAKLHVAVKVLQAMGYPTGFDAD

SEQ ID NO: 2240 - protein, 41 aa, synthetic construct
MKALSKQPLWNHLLNYYKEQKVLVEGPLNNLRESLMQFSKP

SEQ ID NO: 2241 - protein, 41 aa, synthetic construct
MDFLVQIKEFAGEDTSDLFLEEREIALRQADEEKHKRQMSV

SEQ ID NO: 2242 - protein, 41 aa, synthetic construct
MQKEEYWRRREEEERWRMEMRRYEEDMYWRRMEEEQHHWDD

SEQ ID NO: 2243 - protein, 41 aa, synthetic construct
MPRQLQLHYCDICKISCAGPQTYREHLGGQKHRKKEAAQKT

SEQ ID NO: 2244 - protein, 41 aa, synthetic construct; identical to SEQ ID NO: 2148

SEQ ID NO: 2245 - protein, 41 aa, synthetic construct
MISPQPRPWRPLPAQAQSAWGPAPAPATYRAEGGWPQVSVL

SEQ ID NO: 2246 - protein, 41 aa, synthetic construct
MRPLPAQAQSAWGPAPAPATYRAEGGWPQVSVLRDSGPGAG

SEQ ID NO: 2247 - protein, 41 aa, synthetic construct
MARRALLRFLFRQLLLATQGGPKGKEQSVLAPQPGPGPPFT

SEQ ID NO: 2248 - protein, 41 aa, synthetic construct
MEDDDTLSTSSAEVKENRNVGNLAARPPPSGDRARGGAPGA

SEQ ID NO: 2249 - protein, 41 aa, synthetic construct
MTLSTSSAEVKENRNVGNLAARPPPSGDRARGGAPGAKRKR

SEQ ID NO: 2250 - protein, 41 aa, synthetic construct
MSSAEVKENRNVGNLAARPPPSGDRARGGAPGAKRKRPLEE

SEQ ID NO: 2251 - protein, 41 aa, synthetic construct
MADFPDTLFQEFEPPAPRPGLAGGRPGDAALLSAAYGRRRL

SEQ ID NO: 2252 - protein, 41 aa, synthetic construct
MDTLFQEFEPPAPRPGLAGGRPGDAALLSAAYGRRRLLCRA

SEQ ID NO: 2253 - protein, 41 aa, synthetic construct
MQEFEPPAPRPGLAGGRPGDAALLSAAYGRRRLLCRALDLV

SEQ ID NO: 2254 - protein, 41 aa, synthetic construct
MPPAPRPGLAGGRPGDAALLSAAYGRRRLLCRALDLVGPTP

SEQ ID NO: 2255 - protein, 41 aa, synthetic construct
MRPGLAGGRPGDAALLSAAYGRRRLLCRALDLVGPTPATPA

SEQ ID NO: 2256 - protein, 41 aa, synthetic construct
MPGDAALLSAAYGRRRLLCRALDLVGPTPATPAAPGERNPV

SEQ ID NO: 2257 - protein, 41 aa, synthetic construct
MALLSAAYGRRRLLCRALDLVGPTPATPAAPGERNPVVLLN

SEQ ID NO: 2258 - protein, 41 aa, synthetic construct
MAAYGRRRLLCRALDLVGPTPATPAAPGERNPVVLLNRLRA

SEQ ID NO: 2259 - protein, 41 aa, synthetic construct
MRRRLLCRALDLVGPTPATPAAPGERNPVVLLNRLRAGLRY

SEQ ID NO: 2260 - protein, 41 aa, synthetic construct
MLCRALDLVGPTPATPAAPGERNPVVLLNRLRAGLRYVCLA

SEQ ID NO: 2261 - protein, 41 aa, synthetic construct
MASLAANTFTITGHAETKQLTEMLPSILNQLGADSLTSLRR

SEQ ID NO: 2262 - protein, 41 aa, synthetic construct
MVIEGKNSSAVEQDHAKTSAKTERASAQQENSSTCIGSAIK

SEQ ID NO: 2263 - protein, 41 aa, synthetic construct
MRVGKQLASQKILQLLHPHVKNWGSLLRMYGRESSKMVKQE

SEQ ID NO: 2264 - protein, 41 aa, synthetic construct
MTRYGDGPRPPKMARYDNGSGYRRGGSSYSGGGYGGGYSSG

SEQ ID NO: 2265 - protein, 41 aa, synthetic construct
MCGPFTDRSGLYERLLMELEEALNFINDCNISVHSKERDST

SEQ ID NO: 2266 - protein, 41 aa, synthetic construct
MIKEAGKQDPELAYISSNFITGHGIGKNQPRNKQMEAEFRK

SEQ ID NO: 2267 - protein, 41 aa, synthetic construct
MVSLGDDPSQPQTTINKEQFSKRKNDTLDPELFVECTECGR

SEQ ID NO: 2268 - protein, 41 aa, synthetic construct
MSAKELPYFEGDFWPNVLEESIKELEQEEEERKREENTSNE

SEQ ID NO: 2269 - protein, 41 aa, synthetic construct
MPMAPMGMNPPPMTRGPSGHLEPGMGPTGMQQQPPWSQGGL

SEQ ID NO: 2270 - protein, 41 aa, synthetic construct
MLVTKINNVIDNLIVAPGTFEVQIEEVRQVGSYKKGTMTTG

SEQ ID NO: 2271 - protein, 41 aa, synthetic construct
MEVDGNSFEASGPSKKTAKLHVAVKVLQDMGLPTGAEGRDS

SEQ ID NO: 2272 - protein, 41 aa, synthetic construct
MSKKTAKLHVAVKVLQDMGLPTGAEGRDSSKGEDSAEETEA

SEQ ID NO: 2273 - protein, 41 aa, synthetic construct
MIVGSLKSTPENHPETPKKKSDPELSKSEMKQSESRLAESK

SEQ ID NO: 2274 - protein, 41 aa, synthetic construct
MAEIESTMPLCERVKMNKRKRSTVNEKPKYAEISSDEDNDS

SEQ ID NO: 2275 - protein, 41 aa, synthetic construct; identical to SEQ ID NO: 2177

SEQ ID NO: 2276 - protein, 41 aa, synthetic construct
MTSVREAAVELLGRFVLCRPQLAEQYYDMLIERILDTGISV

SEQ ID NO: 2277 - protein, 41 aa, synthetic construct
MMEHLDPDEEEEEGEVSASTNARNKAITSLLGGGSPKNNTA

SEQ ID NO: 2278 - protein, 41 aa, synthetic construct
MGFVRERTLDKRWRVRKEAMMGLAQLYKKYCLHGEAGKEAA

SEQ ID NO: 2279 - protein, 41 aa, synthetic construct
MQSRVEEITMREEVGNISILQENDFGDFGMDDREIMREGSA

SEQ ID NO: 2280 - protein, 41 aa, synthetic construct
MDDNFGEGNDGGILDDKLISNNDGGIFDDPPALSEAGVMLP

SEQ ID NO: 2281 - protein, 41 aa, synthetic construct
MWNNRLLKLFTRCLTPLVPEDLRKRRKGGEADNLDEFLKEF

SEQ ID NO: 2282 - protein, 41 aa, synthetic construct
MRKGDMDELEKEMLSVEKARQEFEERMEEESQSQGRDLTLE

SEQ ID NO: 2283 - protein, 41 aa, synthetic construct
MEFEERMEEESQSQGRDLTLEENQVKKYHRLKEEASKRAAT

SEQ ID NO: 2284 - protein, 41 aa, synthetic construct
MEKSKLESELANFGPRINDIKRIIQSREREMKDLKEKMNQV

SEQ ID NO: 2285 - protein, 41 aa, synthetic construct
MMNQVEDEVFEEFCREIGVRNIREFEEEKVKRQNEIAKKRL

SEQ ID NO: 2286 - protein, 41 aa, synthetic construct
MEFENQKTRLGIQLDFEKNQLKEDQDKVHMWEQTVKKDENE

SEQ ID NO: 2287 - protein, 41 aa, synthetic construct
MLGIQLDFEKNQLKEDQDKVHMWEQTVKKDENEIEKLKKEE

SEQ ID NO: 2288 - protein, 41 aa, synthetic construct
MVIVGRNGSGKSNLFYAIQFVLSDEFSHLRPEQRLALLHEG

SEQ ID NO: 2289 - protein, 41 aa, synthetic construct
MRLFYHIVDSDEVSTKILMEFNKMNLPGEVTFLPLNKLDVR

SEQ ID NO: 2290 - protein, 41 aa, synthetic construct
MDCITLEGDQVSHRGALTGGYYDTRKSRLELQKDVRKAEEE

SEQ ID NO: 2291 - protein, 41 aa, synthetic construct
MYDTRKSRLELQKDVRKAEEELGELEAKLNENLRRNIERIN

SEQ ID NO: 2292 - protein, 41 aa, synthetic construct
MQSLEASLHAMESTRESLKAELGTDLLSQLSLEDQKRVDAL

SEQ ID NO: 2293 - protein, 41 aa, synthetic construct
MERIKLEGIITRVETYLNENLRKRLDQVEQELNELRETEGG

SEQ ID NO: 2294 - protein, 41 aa, synthetic construct
MVQKLKILRQELSQQQPQAGHCRIEVSREEIFEESYRQVMK

SEQ ID NO: 2295 - protein, 41 aa, synthetic construct
MLENDITGVLDHTFCVEHNAYGEIIQHELKPNGKSIPVNEE

SEQ ID NO: 2296 - protein, 41 aa, synthetic construct
MMETELKPPGPQQTSGGGGGNSTAAAAGGNQKNSPDRVKRP

SEQ ID NO: 2297 - protein, 41 aa, synthetic construct
MKTLMKKDKYTLPGGLLAPGGNSMASGVGVGAGLGAGVNQR

SEQ ID NO: 2298 - protein, 41 aa, synthetic construct
MKKDKYTLPGGLLAPGGNSMASGVGVGAGLGAGVNQRMDSY

SEQ ID NO: 2299 - protein, 41 aa, synthetic construct
MDASWELVDPTPDLQALFVQFNDQFFWGQLEAVEVKWSVRM

SEQ ID NO: 2300 - protein, 41 aa, synthetic construct
MLHEHAAYLVDSLWESSQELLKDWECMTELLLEEPVQGEEA

SEQ ID NO: 2301 - protein, 41 aa, synthetic construct
MLQSELLSFVMDHVFIDQDEENQSMEGDEEDEANKIEALHK

SEQ ID NO: 2302 - protein, 41 aa, synthetic construct
MTVHSYLEKFLTEQMMERREDVWLPLISYRNSLVTGGEDDR

SEQ ID NO: 2303 - protein, 41 aa, synthetic construct
MKTCKKGKKGPAEKGKGGNGGGKPPSGPNRMNGHHQQNGVE

SEQ ID NO: 2304 - protein, 41 aa, synthetic construct
MKLMTALVNVALNLSINMDNTQRQYEAERNKMIGKRANERL

SEQ ID NO: 2305 - protein, 41 aa, synthetic construct
MLLLEEPLSGEEALTDRQESALIEIMLCTIRQAAECHPPVG

SEQ ID NO: 2306 - protein, 41 aa, synthetic construct
MALQCTHYVILWQLAKITESSSTKEDLLRLKKQMRVFCQIC

SEQ ID NO: 2307 - protein, 41 aa, synthetic construct
MFMTFQMSLRREDVWLPLMSYRNSLLAGGDDDTMSVISGIS

SEQ ID NO: 2308 - protein, 41 aa, synthetic construct
MKRNAAENMLEILGFKVPQAQPTKPALKSEEKTPIKKPGDG

SEQ ID NO: 2309 - protein, 41 aa, synthetic construct
MPQAQPTKPALKSEEKTPIKKPGDGRKVTFFEPGSGDENGT

SEQ ID NO: 2310 - protein, 41 aa, synthetic construct
MKTAKLHVAVKVLQAMGYPTGFDADIECMSSDEKSDNESKN

SEQ ID NO: 2311 - protein, 41 aa, synthetic construct
MKGSVRTGLFEWDNDFEDIRSEDCILSLDSDPLLEMKDDDF

SEQ ID NO: 2312 - protein, 41 aa, synthetic construct
MGGDEGGSGSSNYKIKYFGFDDLSESEDDEDDDCQVERKTS

SEQ ID NO: 2313 - protein, 41 aa, synthetic construct
MQVHAVQALVQLFLERERAAQLAESKTDELIKDAPTTQHDK

SEQ ID NO: 2314 - protein, 41 aa, synthetic construct
MNSIVWIKENNLEECGLELYFIQDMEILGKVTTHELKEGGE

SEQ ID NO: 2315 - protein, 41 aa, synthetic construct
MQKSTIYRHYTKNSKQIQWFWQVVKEMDNEKRIRLLQFVTG

SEQ ID NO: 2316 - protein, 41 aa, synthetic construct
MPTCVEKEKVYIGKLNMILVQILKQEWPKHWPTFISDIVGA

SEQ ID NO: 2317 - protein, 41 aa, synthetic construct
MFYEAVGYMIGAQTDQTVQEHLIEKYMLLPNQVWDSIIQQA

SEQ ID NO: 2318 - protein, 41 aa, synthetic construct
MNKLGGHITAEIPQIFDAVFECTLNMINKDFEEYPEHRTNF

SEQ ID NO: 2319 - protein, 41 aa, synthetic construct; identical to SEQ ID NO: 2202

SEQ ID NO: 2320 - protein, 41 aa, synthetic construct; identical to SEQ ID NO: 2203

SEQ ID NO: 2321 - protein, 41 aa, synthetic construct
MSEKPSKTLLSRIAENLPKQLAVISPEKYDIKCAVSEAAII

SEQ ID NO: 2322 - protein, 41 aa, synthetic construct
MCQRVPTWSDFPSWAMELLVEKAISSASSPQSPGDALRRVF

SEQ ID NO: 2323 - protein, 41 aa, synthetic construct
MRMRKQRHLAEERLEQLRRWHAERRRLEEEPPQDVPPHAPP

SEQ ID NO: 2324 - protein, 41 aa, synthetic construct
MQRHLAEERLEQLRRWHAERRRLEEEPPQDVPPHAPPDWAQ

SEQ ID NO: 2325 - protein, 41 aa, synthetic construct
MAEERLEQLRRWHAERRRLEEEPPQDVPPHAPPDWAQPLLM

SEQ ID NO: 2326 - protein, 41 aa, synthetic construct
MWGALPAWAMELLVEKAVSSAAGPLGPGDAVRRVLECVATG

SEQ ID NO: 2327 - protein, 41 aa, synthetic construct
MGMDLLPPRHRLGARFRKRQRGPGEGEEGAGEKKRGRRGGE

SEQ ID NO: 2328 - protein, 9 aa, synthetic construct
RKKRRQRRR

SEQ ID NO: 2329 - protein, 16 aa, synthetic construct
RQIKIWFQNRRMKWKK

SEQ ID NO: 2330 - protein, 21 aa, synthetic construct
TRSSRAGLQFPVGRVHRLLRK

SEQ ID NO: 2331 - protein, 26 aa, synthetic construct
GWTLNSAGYLLGKINKALAALAKKIL

SEQ ID NO: 2332 - protein, 18 aa, synthetic construct
KLALKLALKALKAALKLA

SEQ ID NO: 2333 - protein, 16 aa, synthetic construct
AAVALLPAVLLALLAP

SEQ ID NO: 2334 - protein, 10 aa, synthetic construct
VPMLKPMLKE

SEQ ID NO: 2335 - protein, 28 aa, synthetic construct
MANLGYWLLALFVTMWTDVGLCKKRPKP

SEQ ID NO: 2336 - protein, 18 aa, synthetic construct
LLIILRRRIRKQAHAHSK

SEQ ID NO: 2337 - protein, 21 aa, synthetic construct
KETWWETWWTEWSQPKKKRKV

SEQ ID NO: 2338 - protein, 18 aa, synthetic construct
RGGRLSYSRRRFSTSTGR

SEQ ID NO: 2339 - protein, 15 aa, synthetic construct
SDLWEMMMVSLACQY

SEQ ID NO: 2340 - protein, 12 aa, synthetic construct
TSPLNIHNGQKL

SEQ ID NO: 2341 - protein, 7 aa, synthetic construct
KKRPKPG

SEQ ID NO: 2342 - protein, 9 aa, synthetic construct
RKKRRQRRR

SEQ ID NO: 2343 - protein, 13 aa, synthetic construct
GRKKRRQRRRPPQ

SEQ ID NO: 2344 - protein, 33 aa, synthetic construct
GDCLPHLKLCKENKDCCSKKCKRRGTNIEKRCR

SEQ ID NO: 2345 - protein, 17 aa, synthetic construct
LLILRRRIRKQAHAHSK

SEQ ID NO: 2346 - protein, 27 aa, synthetic construct
GWTLNSAGYLLGKINLKALAALAKKIL

SEQ ID NO: 2347 - protein, 20 aa, synthetic construct
GLWRALWRLLRSLWRLLWRA

SEQ ID NO: 2348 - protein, 27 aa, synthetic construct
LSTAADMQGWTDGMASGLDKDYLKPDD

SEQ ID NO: 2349 - protein, 5 aa, synthetic construct
GGGGS

SEQ ID NO: 2350 - protein, 12 aa, synthetic construct
GKSSGSGSESKS

SEQ ID NO: 2351 - protein, 14 aa, synthetic construct
GSTSGSGKSSEGKG

SEQ ID NO: 2352 - protein, 18 aa, synthetic construct
GSTSGSGKSSEGSGSTKG

SEQ ID NO: 2353 - protein, 18 aa, synthetic construct
GSTSGSGKPGSGEGSTKG

SEQ ID NO: 2354 - protein, 14 aa, synthetic construct
EGKSSGSGSESKEF

SEQ ID NO: 2355 - protein, 40 aa, synthetic construct
MTWDGVLQGERLLTMSCSDKIARWNVVGIQSLLSIFVPEI

SEQ ID NO: 2356 - protein, 40 aa, synthetic construct
MAWDGVLQGERLLTMSCSDKIARWNVVGIQSLLSIFVPEI

SEQ ID NO: 2357 - protein, 40 aa, synthetic construct
MTADGVLQGERLLTMSCSDKIARWNVVGIQSLLSIFVPEI

SEQ ID NO: 2358 - protein, 40 aa, synthetic construct
MTWAGVLQGERLLTMSCSDKIARWNVVGIQSLLSIFVPEI

SEQ ID NO: 2359 - protein, 40 aa, synthetic construct
MTWDGVLQGEALLTMSCSDKIARWNVVGIQSLLSIFVPEI

SEQ ID NO: 2360 - protein, 40 aa, synthetic construct
MTWDGVLQGERLLTMSASDKIARWNVVGIQSLLSIFVPEI

SEQ ID NO: 2361 - protein, 40 aa, synthetic construct
MTWDGVLQGERLLTMSCSDAIARWNVVGIQSLLSIFVPEI

SEQ ID NO: 2362 - protein, 40 aa, synthetic construct
MTWDGVLQGERLLTMSCSDKIAAWNVVGIQSLLSIFVPEI

SEQ ID NO: 2363 - protein, 40 aa, synthetic construct
MTWDGVLQGERLLTMSCSDKIARWNVVGIQALLSIFVPEI

SEQ ID NO: 2364 - protein, 40 aa, synthetic construct
MAAAGVLQGEALLTMSASDAIAAWNVVGIQALLSIFVPEI